(19) United States
(12) Patent Application Publication
(10) Pub. No.: US 2024/0009326 A1
(43) Pub. Date: Jan. 11, 2024

(54) AAV-ABCD1 CONSTRUCTS AND USE FOR TREATMENT OR PREVENTION OF ADRENOLEUKODYSTROPHY (ALD) AND/OR ADRENOMYELONEUROPATHY (AMN)

(71) Applicant: SwanBio Therapeutics Limited, London (GB)

(72) Inventors: Sean Clark, Princeton, NJ (US); Karen Kozarsky, Bala Cynwyd, PA (US); Tugba Guven-Ozkan, Plymouth Meeting, PA (US); Anna Tretiakova, Philadelphia, PA (US)

(73) Assignee: SwanBio Therapeutics Limited, London (GB)

(21) Appl. No.: 18/458,665

(22) Filed: Aug. 30, 2023

Related U.S. Application Data
(62) Division of application No. 17/557,409, filed on Dec. 21, 2021, now Pat. No. 11,779,655.
Application No. 17/557,409 is a continuation of application No. PCT/US2020/067664, filed on Dec. 31, 2020.
(60) Provisional application No. 62/955,667, filed on Dec. 31, 2019.

(51) Int. Cl. A61K 48/00; A61K 9/00; C12N 15/86

(52) U.S. Cl. CPC A61K 48/005; A61K 9/0019; C12N 15/86; C12N 2800/107

(57) ABSTRACT

The present disclosure generally relates to polynucleotides and AAV vectors that provide for the expression of ALD protein in target (e.g., neurons or glial) cells when administered to subjects in need thereof. The present disclosure further relates to compositions comprising such a polynucleotide or vector. These polynucleotides, vectors, and compositions may be used for the treatment and prevention of ALD or AMN in subjects in need thereof.

### RELATED APPLICATIONS

[0001] This application is a divisional of U.S. application Ser. No. 17/557,409, filed Dec. 21, 2021, which is a continuation of International Application No. PCT/US2020/067664, filed Dec. 31, 2020, which claims priority to U.S. Provisional Application No. 62/955,667 filed on Dec. 31, 2019, each of which is incorporated by reference herein in its entirety.

### REFERENCE TO AN ELECTRONIC SEQUENCE LISTING

[0002] The contents of the electronic sequence listing (5218070004U502-SEQ-HJD.xml; Size: 3,060,120 bytes); and Date of Creation: Aug. 30, 2023) is herein incorporated by reference in its entirety.

### BACKGROUND

[0003] The present invention describes gene therapies to treat X-linked adrenoleukodystrophy (X-ALD), a progressive monogenic neurodegenerative disease, caused by mutations in the peroxisomal membrane ATP-binding cassette transporter (ABCD1) gene, which encodes for the adrenoleukodystrophy protein (ALDP) responsible for transport of CoA-activated very long-chain fatty acids (VLCFA) into the peroxisome for degradation. Human ALDP is, for example, encoded by the nucleic acid sequence identified by NCBI Reference Sequence: NM_000033 or NM_000033.4.

[0004] ALDP is an integral peroxisomal membrane protein with the ATP-binding domain located towards the cytoplasmic surface of the peroxisomal membrane and responsible for transporting VLCFA-CoA across the peroxisomal membrane into the peroxisomal matrix. ALDP deficiency results in impaired degradation of VLCFAs. As a result, X-ALD patients exhibit accumulation of high levels of saturated, very long chain fatty acids (VLCFA), e.g., saturated VLCFA with chain lengths of greater than 20 carbons (i.e., C>20 such as “C24:0” and “C26:0”), in the blood (which could be detected from either plasma or serum), and tissues of the brain, spinal cord, adrenal cortex and other tissues.

[0005] Clinical phenotypes of X-ALD include adrenomyeloneuropathy (AMN) and cerebral adrenoleukodystrophy (CCALD). Symptoms can begin in childhood or adulthood. Adult ALD patients typically develop adrenomyeloneuropathy (AMN), a debilitating neurological disorder, in their twenties (Engelen et al., Orphanet J Rare Dis. 2012; 7: 51). The Abcd1 knock-out mouse develops a phenotype similar to AMN, manifesting spinal cord axon degeneration as well as peripheral neuropathy due to affected dorsal root ganglia neurons (DRGs) (Pujol et al., Hum Mol Genet. 2002; 11:499-505).

[0006] Childhood cerebral adrenoleukodystrophy (CCALD) is a very rare, sometimes rapidly progressive, X-linked genetic neurologic disorder in boys (median age of onset age 7; range 3-15 years) that, untreated, leads to a vegetative state, and ultimately death, within a median of 5 years after diagnosis. CCALD often initially presents as Addison's disease, but the diagnosis is usually made based on “sudden” decreases in attention, thinking, concentration, and other cerebral functions with confirmatory findings of cerebral demyelination on magnetic resonance imaging (MRI). Prior to demyelination, the MRI of the patient's brain is normal, and there are no neurodevelopmental abnormalities. The clinical course may be “slow” at first but can become rapidly progressive and irreversible with the widespread loss of myelin in the brain. The terms “slow” and “sudden” are relative in that the duration of demyelination is not truly known, but the rapid decrease in cognitive and motor function can happen at any time and for unknown reasons. Indeed, the MRI changes precede symptoms, and can be floridly abnormal with widespread demyelination at a time when there are very few clinical manifestations of the disease. The incidence of X-linked ALD in the United States is about 1:21,000 male births with about 35% developing CCALD; about 35 to 40 boys are diagnosed with CCALD each year. The cause of the disease is a mutation of the ATP-binding cassette, sub-family D, member 1 (ABCD1) gene leading to a dysfunctional or absent adrenoleukodystrophy protein (ALDP) gene product. ALDP localizes to cellular peroxisomes, where it participates in the degradation of very long chain fatty acids (VLCFA) (chain lengths of >20 carbons) via beta oxidation to shorter fatty acids, which are used to maintain cellular structure and function.

[0007] Currently ALD is treated by allogeneic hematopoietic stem cell transplant (HCT) which supply cells that produce functional ALDP, and fully matched related donor human stem cell transplantation using cells producing functional ALDP can potentially ameliorate or stop the progression of demyelination. However, it takes 12 to 18 months for allogeneic HCT to stabilize the disease, and because of the progressive nature of the disease, transplantation should be done as soon as possible upon diagnosis. This is sometimes problematic because of the lead times needed to find related or unrelated matched bone marrow stem cell donors. The use of allogeneic stem cells also presents a risk of graft failure and the development of acute and chronic graft versus host disease (GvHD). These complications can lead to death and are increased in incidence when unrelated donors are utilized as a source for allogeneic hematopoietic stem cells.

[0008] Another source of ALDP replacement is the use of matched or, more typically, partially matched cord blood cell transplants. However, the use of cord blood stem cells (CBSCs) is problematic, with a risk of graft failure and prolonged time to engraftment requiring extended transfusion support. Indeed, all forms of allogeneic HCT involve a 10-15% risk of transplant related mortality, and up to a 30% risk of chronic graft versus host disease.

[0009] Adeno-associated viruses (AAVs), a defective nonpathogenic human parvovirus, are commonly used for gene delivery because of their mild immune response and lack of pathogenicity. AAV viruses can direct long-term transgene expression, but generally are not permanently integrated into the host genome. Given such capabilities, AAVs provide a viable option for safe and effective gene therapies. While transduction of central nervous system cells in vitro and in vivo using recombinant adeno-associated virus serotype 9 (rAAV9) vectors for delivery of the human ABCD1 gene was previously reported, there is an unmet need in the art for safer and more efficient adrenoleukodystrophy therapies. Given that different AAV serotypes display different cellular tropisms, it important to select an optimal serotype(s) for establishing a gene transfer system. The present invention provides solutions to these and other problems by providing improved adeno-associated viral vectors and delivery systems that are safe and effective, i.e., which may be used to deliver non-toxic levels of ABCD1 in patients suffering from X-ALD or AMN.

### BRIEF SUMMARY OF THE INVENTION

[0010] It is a specific object of the invention to provide safe and effective methods and materials for treating or preventing ALD or AMN involving the administration of novel and improved AAV DNA constructs.

[0011] The present invention provides improved adeno-associated virus (AAV) constructs. The present invention also provides for the method for producing the improved recombinant AAV (rAAV) vectors through co-transfection of a plasmid containing the rAAV vector genome which encodes the ATP-binding cassette, sub-family D, member 1 (ABCD1) gene (“rAAV Genome Vector”) and a second plasmid encoding the AAV Rep and Cap protein (“Rep/Cap plasmid”), and one or more virus helper plasmids. The present invention also provides cells and compositions containing these AAV constructs which may be used in the treatment and/or prevention of adrenoleukodystrophy and/or adrenomyeloneuropathy in subjects in need thereof.

[0012] The present invention further provides methods for making such improved AAV constructs which encode the ABCD1 gene expressing ALD proteins (“ALDPs”, also referred to herein as “ABCD1” protein). Also, the invention provides methods of using the subject improved AAV constructs which express the ALD proteins and cells and compositions containing for the treatment and/or prevention of adrenoleukodystrophy and/or adrenomyeloneuropathy in subjects in need thereof, e.g., methods wherein such improved AAV constructs are administered, e.g., by intrathecal, intracerebroventricular (ICV), intrathecal-lumbar (IT-L), intravascular, intramuscular, or intracisternal administration.

[0013] In some embodiments, the present invention contemplates in part, an rAAV Genome Vector comprising: (a) a 5′ Inverted Terminal Repeat (5′ITR); (b) a promoter operably linked to a polynucleotide encoding a human ABCD1 gene; (c) a modified woodchuck post-transcriptional regulatory element, wherein the X-protein, is inactivated (WPRE x-inact); (d) at least one terminator; (e) at least one polyA signal and (f) a 3′ Inverted Terminal Repeat (3′ ITR).

[0014] In some embodiments, the present invention contemplates in part, an rAAV Genome Vector comprising: (a) a 5′ Inverted Terminal Repeat (5′ITR); (b) an enhancer operably linked to (c) a promoter further comprising an intron at its 3′ end and operably linked to (d) a polynucleotide encoding a human ABCD1 gene; (e) a modified woodchuck post-transcriptional regulatory element, wherein the X-protein, is inactivated (WPRE x-inact); (f) at least one terminator; (g) at least one polyA signal and (h) a 3′ Inverted Terminal Repeat (3′ ITR).

[0015] In some embodiments, the present invention contemplates in part, an rAAV Genome Vector comprising: (a) a 5′ Inverted Terminal Repeat (5′ITR); (b) a promoter operably linked to a polynucleotide encoding a human ABCD1 gene further comprising an enhancer at its 5′end or an intron at its 3′end; (c) a modified woodchuck post-transcriptional regulatory element, wherein the X-protein, is inactivated (WPRE x-inact); (d) at least one terminator; (e) at least one polyA signal and (f) a 3′ Inverted Terminal Repeat (3′ ITR).

[0016] In some embodiments, the present invention contemplates in part, an rAAV Genome Vector comprising: (a) a 5′ Inverted Terminal Repeat (5′ITR); (b) a promoter operably linked to a polynucleotide encoding a human ABCD1 gene; (c) at least one terminator; (d) at least one polyA signal and (e) a 3′ Inverted Terminal Repeat (3′ ITR).

[0017] In some embodiments, the present invention contemplates in part, an rAAV Genome Vector comprising: (a) a 5′ Inverted Terminal Repeat (5′ITR); (b) an enhancer operably linked to (c) a promoter further comprising an intron at its 3′ end; (d) operably linked to a polynucleotide encoding a human ABCD1 gene; (e) at least one terminator; (f) at least one polyA signal and (g) a 3′ Inverted Terminal Repeat (3′ ITR).

[0018] In some embodiments, the present invention contemplates in part, an rAAV Genome Vector comprising: (a) a 5′ Inverted Terminal Repeat (5′ITR); (b) a promoter operably linked to a polynucleotide encoding a human ABCD1 gene further comprising an enhancer at its 5′end or an intron at its 3′end; (c) at least one terminator; (d) at least one polyA signal and (e) a 3′ Inverted Terminal Repeat (3′ ITR).

[0019] In some embodiments, the present invention contemplates in part, an rAAV Genome Vector comprising: (a) a 5′ Inverted Terminal Repeat (5′ITR); (b) a promoter operably linked to a polynucleotide encoding a human ABCD1 gene further comprising at its 5′ end, a Kozak Consensus Sequence (‘CCACC’ or ‘GCCACC’, or any sequence representing an approach to the consensus sequence for optimal protein translation initiation: ‘GCCRCCATGG’); (c) at least one terminator; (d) at least one polyA signal and (e) a 3′ Inverted Terminal Repeat (3′ ITR).

[0020] In some embodiments, the present invention contemplates in part, an rAAV Genome Vector comprising: (a) a 5′ Inverted Terminal Repeat (5′ITR); (b) an enhancer operably linked to (c) a promoter further comprising an intron at its 3′ end and operably linked to (d) a polynucleotide encoding a human ABCD1 gene further comprising at its 5′ end, a Kozak Consensus Sequence (‘CCACC’ or ‘GCCACC’, or any sequence representing an approach to the consensus sequence for optimal protein translation initiation: ‘GCCRCCATGG’); (e) at least one terminator; (f) at least one polyA signal and (g) a 3′ Inverted Terminal Repeat (3′ ITR).

[0021] In some embodiments, the present invention contemplates in part, an rAAV Genome Vector comprising: (a) a 5′ Inverted Terminal Repeat (5′ITR); (b) a promoter operably linked to a polynucleotide encoding a human ABCD1 gene further comprising at its 5′ end, a Kozak Consensus Sequence (‘CCACC’ or ‘GCCACC’, or any sequence representing an approach to the consensus sequence for optimal protein translation initiation: ‘GCCRCCATGG’); (c) optionally an enhancer at the 5′ end of the Kozak sequence or an intron at the 3′ end of the promoter; (d) at least one terminator; (e) at least one polyA signal and (f) a 3′ Inverted Terminal Repeat (3′ ITR).

[0022] In some embodiments, the present invention contemplates in part, an rAAV Genome Vector comprising: (a) a 5′ Inverted Terminal Repeat (5′ITR); (b) a promoter operably linked to a Kozak Consensus Sequence (‘CCACC’ or ‘GCCACC’, or any sequence representing an approach to the consensus sequence for optimal protein translation initiation: ‘GCCRCCATGG’) upstream of a polynucleotide encoding a human ABCD1 gene containing 3, 6, or 9 nucleotide changes within the ABCD1 coding sequence; (c) at least one terminator; (d) at least one polyA signal and (e) a 3′ Inverted Terminal Repeat (3′ ITR).

[0023] In some embodiments, the present invention contemplates in part, an rAAV Genome Vector comprising: (a) a 5′ Inverted Terminal Repeat (5′ITR); (b) an enhancer operably linked to (c) a promoter comprising an intron at its 3′ end (d) a Kozak Consensus Sequence (‘CCACC’ or ‘GCCACC’, or any sequence representing an approach to the consensus sequence for optimal protein translation initiation: ‘GCCRCCATGG’) upstream of a polynucleotide encoding a human ABCD1 gene containing 3, 6, or 9 nucleotide changes within the ABCD1 coding sequence; (e) at least one terminator; (f) at least one polyA signal and (g) a 3′ Inverted Terminal Repeat (3′ ITR).

[0024] In some embodiments, the present invention contemplates in part, an rAAV Genome Vector comprising: (a) a 5′ Inverted Terminal Repeat (5′ITR); (b) a promoter operably linked to a Kozak Consensus Sequence (‘CCACC’ or ‘GCCACC’, or any sequence representing an approach to the consensus sequence for optimal protein translation initiation: ‘GCCRCCATGG’) upstream of a polynucleotide encoding a human ABCD1 gene containing 3, 6, or 9 nucleotide changes within the ABCD1 coding sequence; (c) optionally an enhancer at the 5′ end of the Kozak sequence or an intron at the 3′ end of the promoter (d) at least one terminator; (e) at least one polyA signal and (f) a 3′ Inverted Terminal Repeat (3′ ITR).

[0025] In any of the embodiments, the at least one terminator may be comprised in the ABCD1 gene-encoding polynucleotide.

[0026] In some embodiments the rAAV genome comprises an enhancer, a promoter, a β-actin exon, an intron, and/or a β-globin exon, optionally in the direction from the 5′end to the 3′end.

[0027] In some of the embodiments the enhancer is a CMV enhancer.

[0028] In some of the embodiments the promoter is a Chicken Beta Actin Promotor.

[0029] In some of the embodiments the β-actin exon is derived from one of the alternate transcripts of chicken beta actin and the chimeric intron consists of the donor from the chicken beta actin first intron and the acceptor from the rabbit beta-globin second¹ intron. ¹When we refer to a “first”, “second” or “third” exon here this refers to the “first”, “second” or “third” exon in the transcript from the 5′ end.

[0030] In some of the embodiments the intron is a chimeric intron.

[0031] In some of the embodiments, the β-globin exon is a rabbit β-globin exon, such as a rabbit β-globin third exon.

[0032] In any of the embodiments, the polyA signal may comprise SV40 polyA signal, bGH polyA signal, or a combination thereof. A polyA signal may also be referred to herein as “pA”.

[0033] In other embodiments the present invention contemplates in part, an AAV Rep/Cap plasmid comprising: (a) a promoter (b) a replication gene; (c) a capsid gene.

[0034] In some embodiments the Rep/Cap plasmid comprises one or more of the p5, p19, or p40 promoters.

[0035] In some embodiments the replication gene is selected from the replication gene or a variant thereof of AAV serotypes AAV1, AAV2, AAV3, AAV4, AAV5, AAV6, AAV7, AAV8, AAV9, or AAVrh.10 encoding for Rep 78, Rep 68, Rep 52, or Rep 40 proteins.

[0036] In some embodiments, the replication gene is or is derived from the replication gene of AAV2, AAV9, or AAVrh.10.

[0037] In some embodiments, when the replication gene (Rep gene) is derived from that of AAV2, two replication gene products, REP78 and REP68 may be transcribed by the p5 promoter, two replication gene products, and REP52 and REP40 may be transcribed by the p19 promoter. In some embodiments, the capsid gene is selected from the capsid gene or a variant thereof of AAV1, AAV2, AAV3, AAV4, AAV5, AAV6, AAV7, AAV8, AAV9, or AAVrh.10 encoding for VP1, VP2, and/or VP3 proteins.

[0038] In some embodiments, the capsid gene is or is derived from the capsid gene of AAV2, AAV9 or AAVrh.10 (also referred to herein as AAVrh10).

[0039] In some embodiments, when the capsid gene (Cap gene) is derived from that of AAV9, three replication gene products VP1, VP2, and VP3 of AAV9 may be transcribed by (i.e., transcribed under the control of) the p40 promoter.

[0040] In some embodiments, when the capsid gene (Cap gene) is derived from that of AAV2, three replication gene products VP1, VP2, and VP3 of AAV2 may be produced.

[0041] In some embodiments, when the capsid gene (Cap gene) is derived from that of AAVrh.10, three replication gene products VP1, VP2, and VP3 of AAVrh.10 may be produced.

[0042] In some embodiments, the Rep/Cap plasmid may be entirely derived from AAV1, AAV2, AAV3, AAV4, AAV5, AAV6, AAV7, AAV8, AAV9, or AAVrh.10, while in some embodiments, the Rep/Cap plasmid may be of a hybrid serotype, such as AAV2/9, which comprises one or more elements/genes from AAV2 and one or more elements/genes from AAV9. In certain embodiments, when the Rep/Cap plasmid is of AAV2/9 serotype, the Rep gene may be of AAV2 and the Cap gene may be of AAV9.

[0043] In some embodiments the 5′ and 3′ inverted Terminal Repeats (ITRS) is naturally occurring from serotypes AAV1, AAV2, AAV3, AAV4, AAV5, AAV6, AAV7, AAV8, AAV9, or AAVrh.10.

[0044] In some embodiments the 5′ and 3′ inverted Terminal Repeat (ITRS) is AAV2.

[0045] In some embodiments the 5′ and 3′ inverted Terminal Repeat (ITRS) are shortened by 15 nucleotides (‘TTGGCCACTCCCTCT’) at the 5′ end and the last 15 nucleotides (‘AGAGGGAGTGGCCAA’) at the 3′ end relative to the natural AAV2 ITRs. This (the set of two removed 15 nucleotide sequences) includes almost all the A region.

[0046] In other embodiments, the present invention contemplates in part, a helper virus or a virus helper plasmid to aid in rAAV production. In some embodiments, the helper virus is adenovirus, herpes simplex virus, or papillomavirus. In some embodiments, the virus helper plasmid comprises one or more genes of adenovirus, herpes simplex virus, or papillomavirus. In some embodiments the helper virus or the virus helper plasmid is derived from or comprises one or more genes of a wildtype (WT) or variant adenovirus such as Adenovirus 5 (Ad5) (e.g., Accession No. AC_000008.1 or SEQ ID NO: 2000) or Adenovirus 2 (Ad2) (e.g., Accession No. J01917.1 or SEQ ID NO: 3000), herpes simplex virus (HSV) such as Human HSV Type I (e.g., Accession No. NC_001806), papillomavirus, or a vaccinia virus (e.g., Accession No. NC_006998).

[0047] In some embodiments, the helper virus or the virus helper plasmid comprises the E1, E2A, E4 and/or VA RNA region sequences from Adenovirus.

[0048] In some embodiments, such helper virus or virus helper plasmid(s) provide(s) one or more genes or gene products (or elements or factors) that facilitate rAAV vector packaging, production, and/or function.

[0049] In some embodiments, when the helper virus or the virus helper plasmid is derived from Ad5 (for example, the plasmid referred to herein as “pALD-X80”), the helper virus or plasmid may contain Ad5 Region VA-RNA, Ad5 Region E2, and/or Ad5 Region E4. In certain embodiments, the Ad5 Region VA-RNA may contain an VA-RNA region (VA RNA I) and/or an VA-RNA region (VA RNA II). In certain embodiments, the Ad5 Region E2 may encode Hexon (C-terminal fragment), 23K endoprotease, E2A/DBP, Hexon Assembly (100K), Hexon Assembly (33K), Hexon Assembly (22K), and/or Hexon-associated precursor. In certain embodiments, the Ad5 Region E4 may encode Fiber, E4 ORF1, E4 ORF2, E4 ORF3, E4 ORF4, E4 ORF6, and/or E4 ORF6/7.

[0050] In some embodiments, when the helper virus or plasmid is derived from Ad2 (for example, the plasmid referred to herein as “pHELP_KanV4”), the helper virus or plasmid may contain an Ad2 Region VA-RNA, Ad2 Region E2, and/or Ad2 Region E4. In certain embodiments, the Ad2 Region VA-RNA may contain VA-RNA region (VA RNA I) and/or VA-RNA region (VA RNA II). In certain embodiments, the Ad2 Region E2 may not encode Hexon and may encode 23K endoprotease (C-terminal fragment), E2A/DBP, Hexon Assembly (100K), Hexon Assembly (33K), Hexon Assembly (22K), and/or Hexon-associated precursor. In certain embodiments, the Ad2 Region E4 may not encode Fiber and may encode E4 ORF1, E4 ORF2, E4 ORF3, E4 ORF4, E4 ORF6, and/or E4 ORF6/7.

[0051] In some embodiments, the present invention contemplates in part, an isolated polynucleotide comprising a recombinant adeno-associated virus (rAAV) vector genome which may be packaged in viral capsids to form a rAAV virion, wherein said rAAV vector genome comprises or consists of: (a) a 5′ AAV inverted terminal repeat (ITR); (b) an expression cassette, wherein the expression cassette comprises at least (i) a promoter active in target cells, operably linked to (ii) a polynucleotide encoding an ATP-binding cassette, sub-family D, member 1 (ABCD1) polypeptide, (iii) one or more terminators and (iv) one or more poly A signal downstream of said ABCD1-encoding polynucleotide; and (c) a 3′ ITR. The rAAV vector genome may not comprise a woodchuck post-transcriptional regulatory element (WPRE) or may comprises a modified WPRE comprising at least one mutation which results in the X protein not being expressed or being expressed in an inactivated form (WPREx-inact).

[0052] In some embodiments, the present invention contemplates in part, an rAAV vector which may be generated using any of the aforementioned AAV genome vector, along with any of the aforementioned Rep/Cap plasmids and any of the aforementioned virus helper plasmids.

[0053] In some embodiments, the present invention contemplates in part, an rAAV vector comprising (I) any of the aforementioned AAV capsids and (II) any of the aforementioned AAV genomes.

[0054] In some embodiments, the present invention contemplates in part, a composition comprising (A) any of the rAAV genome vector and optionally one or more of: (B) a polynucleotide comprising any of the aforementioned AAV cap gene; (C) a polynucleotide comprising any of the aforementioned AAV rep gene; (D) a polynucleotide comprising any of the aforementioned adenovirus helper genes; and/or (E) a pharmaceutically acceptable carrier or excipient. In some instances, such compositions may be used for producing any of the aforementioned rAAV vectors.

[0055] In some embodiments, the present invention contemplates in part, a composition comprising (I) any of the aforementioned rAAV vector and (II) a pharmaceutically acceptable carrier. In some instances, such a composition may be used in any of the methods of treating and preventing disease conditions disclosed herein, e.g., adrenoleukodystrophy (ALD) or adrenomyeloneuropathy (AMN).

[0056] In some embodiments, the present invention contemplates in part, the method of making any of the aforementioned AAV constructs.

[0057] In some embodiments, the present invention contemplates in part, the method of using or administering any of the aforementioned AAV constructs for the treatment of adrenoleukodystrophy (ALD) or adrenomyeloneuropathy (AMN) in a subject in need thereof.

[0058] In some embodiments, the present invention contemplates in part, the method of using or administering any of the aforementioned AAV constructs in combination with a pharmaceutically acceptable carrier.

### BRIEF DESCRIPTION OF THE DRAWINGS

[0059] FIG. 1A-B contain the results of in vivo experiments comparing ABCD1 expression in spinal cord samples in ABCD1 knock-out (KO) mice administered different AAV9-CBA-ABCD1 virions (referred to as “AAV9” due to the use of AAV9 capsid) respectively containing a WPRE, a modified WPRE (containing a mutation which results in the X protein being inactivated) or AAV9-CBA-ABCD1 virions which lack a WPRE wherein ABCD1 expression was detected in spinal cord samples using Western blot methods.

[0060] FIG. 2A-C contain Western blot data of additional in vivo experiments wherein ABCD1 knock-out mice were administered different dosages of AAV9-CBA-ABCD1 virions respectively containing a WPRE (identified as “original”), a modified WPRE (containing a mutation which results in the X protein being inactivated, identified as “X-inactivated”) or AAV9-CBA-ABCD1 virions which lack a WPRE wherein ABCD1 expression was detected in spinal cord samples obtained from treated ABCD1 knock-out mice using Western blot methods.

[0061] FIG. 3A-3C compares the dose response of ABCD1 expression in spinal cord samples of ABCD1 knock-out mice which were administered different dosages (3×10¹¹ or 1×10¹¹ genome copies/mouse) of AAV9-CBA-ABCD1 virions respectively containing a WPRE (identified as “original”), containing a modified WPRE (comprising a mutation which results in the X protein being inactivated, identified as “X-inactivated”) or AAV9-CBA-ABCD1 virions which lack a WPRE; wherein ABCD1 expression was again detected in spinal cord samples obtained from the ABCD1 knock-out mice which were administered the different doses using Western blot methods. ABCD1 expression was lower in virions lacking WPRE.

[0062] FIG. 4A-4B compare VLCFA levels in mixed glial cultures transduced with different AAV9-ABCD1 virions containing a WPRE (“original”) or containing a modified WPRE (comprising a mutation which results in the X protein being inactivated, “x-inact”) wherein VLCFA levels are detected 4 days post transduction from harvested cells for VLCFA analysis. As shown VLCFA levels are lowered to about the same extent in the mixed glial cell cultures which were transduced with different AAV9.ABCD1 virions. All AAV vectors lowered VLCFA in a dose-dependent manner.

[0063] FIG. 5 contains a schematic map of pSBT101, which contains among other sequences a 5′ AAV2 ITR, a CMV enhancer, a chicken beta-actin promoter, a beta-actin exon, a chimeric intron, a rabbit beta-globin exon, a hABCD1 5′ UTR, the human ABCD1 coding sequence, a hABCD1 3′ UTR, a SV40 poly(A) signal sequence, a bGH poly(A) signal sequence, a 3′ AAV2 ITR, and a KanR marker operably linked to the AmpR promoter; wherein such sequences are contained on a pUC57 backbone.

[0064] FIG. 6 contains a schematic map of pOB1005, which contains among other sequences an AAV2 5′ ITR variant (shorter than the wild-type 5′ ITR or the 5′ ITR of pSBT101), CMV enhancer, chicken beta-actin promoter, a beta-actin exon, a beta-actin exon, a chimeric intron, a rabbit beta-globin exon, a human ABCD1 coding sequence further comprising at its 5′ end a KOZAK sequence, a SV40 poly(A) signal sequence, an AAV2 3′ ITR variant (shorter than the wild-type 3′ ITR or the 3′ ITR of pSBT101), and a KanR marker operably linked to the AmpR promoter; wherein such sequences are contained on a pUC118 backbone.

[0065] FIG. 7 contains a schematic map of pOB1010, which contains among other sequences an AAV2 5′ITR variant (shorter than the wild-type 5′ ITR or the 5′ ITR of pSBT101), a CMV enhancer, a chicken beta-actin promoter, a beta-actin exon, a chimeric intron, a rabbit beta-globin exon, a hABCD1 5′ UTR, the human ABCD1 coding sequence, a hABCD1 3′ UTR, a SV40 poly(A) signal sequence, a bGH poly(A) signal sequence, a 3′ AAV2 ITR, and a KanR marker operably linked to the AmpR promoter; wherein such sequences are contained on a pUC118 backbone.

[0066] FIG. 8A-B compares ABCD1 expression levels in transient transfection experiments conducted in HEK293 cells which were transfected with pSBT101 or pOB1005 (and untransfected HEK293 control cells) wherein the plasmids were transfected side-by-side and expression was evaluated in cell lysates by Western blotting and the blots were quantified using densitometry. The anti-ALD protein antibody clone OTI4C2 (OriGene) was used in the Western blot analyses. The results show that the pOB1005 plasmid resulted in better ABCD1 expression.

[0067] FIG. 9 compares the packageability of pSBT101 and pOB1005 into AAV based on titer (gc/ml), productivity (gc/cell) and yield (gc's).

[0068] FIG. 10A compares schematics of the 5′ ITR to the 3′ ITR construct of the original AAV-CBA-hABCD1-WPRE viral particle, the AAV-CBA-hABCD1-WPREXinact viral particle, and the AAV-CBA-hABCD1 (no WPRE) viral particle (also referred to herein as “AAV-CBA-hABCD1”), from the 5′ITR to 3′ ITR. “CMV-e”, “CBA-p”, “BA-ex”, “Chm-int”, and “RBG-ex” are elements contained in the 5′ ITR-3′ ITR and mean CMV enhancer, chicken beta actin promoter, beta actin exon, chimeric intron, and rabbit beta-globin exon, respectively. “ABCD1” is a polynucleotide encoding the ABCD1 gene. “SV40 pA” and “bGHpA” mean SV40 poly A signal and beta growth hormone poly A signal, respectively.

[0069] FIG. 10B provides a table summarizing the SEQ ID NOs assigned to: the sequence of different elements contained in the 5′ ITR-3′ ITR of respective rAAV genome vectors (plasmids that may be used for producing the indicated rAAV viral particles); the 5′ ITR-3′ ITR sequence contained in the respective rAAV genome vectors; the rAAV vector genome sequence contained in the respective rAAV genome vectors (i.e., the sequence packaged into the indicated rAAV viral particles); and the full plasmid sequence of respective rAAV genome vectors. For example, the rAAV genome vector for AAV-CBA-hABCD1-Xinact, has the nucleic acid sequence of SEQ ID NO: 10000, which comprises the 5′ITR-3′ITR sequence of SEQ ID NO: 10050, which comprises different elements such as the 5′ITR (SEQ ID NO: 10001), CMV enhancer (SEQ ID NO: 10005), beta actin exon (SEQ ID NO: 10008), and so forth. “Total poly A signal” refers to the region spanning from the start of SV40 poly A signal to the end of bGH poly A signal. The vector genome of the rAAV virus AAV-CBA-hABCD1-Xinacthas the nucleic acid sequence of SEQ ID NO: 10060. The SEQ ID NO assignments for vectors AAV-CBA-hABCD1-Xinact and AAV-CBA-hABCD1 [no WPRE] are further visually depicted in FIG. 11A-11B.

[0070] FIG. 11A provides a schematic of the AAV-CBA-hABCD1-WPRE Xinact construct with SEQ ID NOs assigned to the nucleic acid sequences of the 5′ ITR, CMV enhancer, chicken β-actin promoter, β-actin exon, chimeric intron, rabbit beta-globin exon, ABCD1 5′ UTR, ABCD1 gene, ABCD1 3′ UTR, WPRE X inact (which is a WPRE modified to expresses an inactivated X protein partial open reading frame), SV40 polyA, bGH poly A, 3′ ITR, Terminator 1 contained in the ABCD1 gene, total poly A (i.e., SV40 pA to bGHpA), and the 5′ ITR to 3′ ITR sequence.

[0071] FIG. 11B contains a schematic of the AAV-CBA-hABCD1 construct (no WPRE), from the 5′ITR to 3′ ITR, and SEQ ID NOs assigned to the nucleic acid sequences of the 5′ ITR, CMV enhancer, chicken 3-actin promoter, 3-actin exon, chimeric intron, rabbit beta-globin exon, ABCD1 5′ UTR, hABCD1 cDNA, Terminator 1 contained in the ABCD1 gene, ABCD1 3′ UTR, SV40 polyA, bGH poly A, total poly A (i.e., SV40 pA to bGHpA), 3′ ITR, and the entire 5′ ITR to 3′ ITR sequence.

[0072] FIG. 12A compares schematics of the 5′ ITR to the 3′ ITR construct of the different viral particles SBT101, OB1005, OB1010, OB1011, OB1012, OB1013, OB1015, OB10107, and OB1008, from the 5′ITR to 3′ ITR. “CMV-e”, “CBA-p”, “BA-ex”, “Chm-int”, and “RBG-ex” are elements contained in the 5′ ITR-3′ ITR and mean CMV enhancer, chicken beta actin promoter, beta actin exon, chimeric intron, and rabbit beta-globin exon, respectively. “SV40 pA” and “bGHpA” mean SV40 poly A signal and beta growth hormone poly A signal, respectively. “ABCD1” is a polynucleotide encoding the ABCD1 gene. “ABCD1/3nt” and “ABCD1/9nt” contain nucleic acid differences at three and nine positions, respectively, relative to “ABCD1”. The name of the plasmids (rAAV genome vectors) that encode the vector genome of the indicated rAAV viral particles and the plasmid backbones are also indicated. FIG. 12B provides a table summarizing SEQ ID NOs assigned to: the sequence of different elements contained in the 5′ ITR-3′ ITR of respective rAAV genome vectors (plasmids that may be used for producing the indicated rAAV viral particles); the 5′ ITR-3′ ITR sequence contained in the respective rAAV genome vectors; the rAAV vector genome sequence contained in the respective rAAV genome vectors (i.e., the sequence packaged into the indicated rAAV viral particles); and the full plasmid sequence of respective rAAV genome vectors. For example, the rAAV genome vector for OB1010, i.e., the plasmid pOB1010, has the nucleic acid sequence of SEQ ID NO: 11000, which comprises the 5′ITR-3′ITR sequence of SEQ ID NO: 11050, which comprises different elements such as the 5′ITR (SEQ ID NO: 11001), CMV enhancer (SEQ ID NO: 11005), beta actin exon (SEQ ID NO: 11008), and so forth. “Total poly A signal” refers to the region spanning from the start of SV40 poly A signal to the end of bGH poly A signal. The vector genome of the rAAV virus vector produced by pOB1010 has the nucleic acid sequence of SEQ ID NO: 11060. These SEQ ID NO assignments for respective vectors are further visually depicted in FIG. 12C-12J which visually explain SEQ ID NOS assigned to elements of the genome of different viral particles, SBT101 (FIG. 12C), OB1005 (FIG. 12D), OB1010 (FIG. 12E), OB1011 (FIG. 12F), OB1012 (FIG. 12G), OB1013 (FIG. 12H), OB1015 (FIG. 12I), and OB10107 (FIG. 12J).

[0073] FIGS. 13A-13E provide exemplary ABCD1 protein expression levels obtained in Example 8 using different rAAVs according to the present disclosure. FIGS. 13A-13D provides ABCD1 protein levels plotted against the MOI with dose-expression curves fitted as described in each figure, estimated relative potential (relative to pOB1008 in FIGS. 13A-13C and relative to SBT101 in FIG. 13D), standard error, 95% confidence interval, and EC50 values for each AAV vector. Plasmids used to produce the test rAAVs are indicated in the bottom box. FIG. 13E shows exemplary western blot wells and relative intensity data.

[0074] FIG. 14 compares exemplary reduction of VLCFA by rAAV vectors pOB1010, pOB1015, and pOB1017 observed in Example 9. Lyso-PC C26/C22 ratios plotted against the MOI with dose-expression curves fitted as described in each figure, estimated relative potential (relative to OB1010), standard error, 95% confidence interval, and EC50 values for each AAV vector are provided. Plasmids used to produce the test rAAVs are indicated in the bottom box.

[0075] FIGS. 15A-15C provide exemplary dose dependency in reduction of VLCFA in ABCD1 KO mixed glial cells observed in Example 10. FIG. 15A shows that low, mid, and high doses (3.3×10⁴, 1.0×10⁵, and 5×10⁵ virus genomes per cell, respectively) of OB1010 provided rAAV dose-dependent reduction in the C26:0/C22:0 ratio and in the C26:0 amount, regardless of the vendor of rAAV production (different purification methods). FIG. 15B shows that VLCFA reduction effects, reduction in C26:0/C22:0 ratio and in C24:0/C22:0 ratio, are dependent on the ABCD1 protein expression levels. FIG. 15C further shows that various VLCFA reduction effects, reduction in the amounts of C26:0 and C24:0 and the C26:0/C22:0 and C24:0/C22:0 ratios, are dependent on the ABCD1 protein expression levels. FIG. 15C also shows that ABCD1 protein levels, on the other hand, do not affect the C22:0 amounts and increase the C16:0 amount.

[0076] FIG. 16 provides exemplary in vivo effects elicited by SBT101 observed in Example 11. Provided are the rAAV dose-dependent vector genome levels in spinal cord (left) dose-dependent ABCD1 protein expression in spinal cord (middle), and dose-dependent recovery of mitochondrial DNA (mtDNA) levels in spinal cord (right). Recovery of mtRNA levels is a surrogate marker for recovery of VLCLA beta-oxidation.

[0077] FIG. 17 provides exemplary results from rAAV packageability comparison in Example 12. Viral titers as determined by the indicated methods (ddPCR and qPCR) obtained by the same production scale using pOB1010, pSBT101, and pOB1008 plasmids are provided.

### DETAILED DESCRIPTION OF THE INVENTION

### Definitions

[0078] Unless otherwise defined, all technical and scientific terms used herein have the same meaning as commonly understood by one of ordinary skill in the art to which this invention belongs. In case of conflict, the present application, including definitions will control.

[0079] As used herein, the term “adenovirus-associated virus vector”, “adenovirus-associated viral vector”, or “AAV vector” encompasses recombinant viral particles comprising (i) at least one capsid protein derived from an AAV and (ii) a recombinant vector genome encoding a gene of interest. In an AAV vector, the recombinant genome is typically packaged or enclosed in the capsid(s) to form a recombinant AAV virion. An “AAV vector” may be also referred to herein as “AAV particle”, “recombinant AAV”, “rAAV”, “recombinant AAV vector”, “rAAV vector”, “recombinant AAV particle”, or “rAAV particle”. The recombinant vector genome of an rAAV vector may be referred to herein as “AAV vector genome”, “recombinant AAV genome”, “rAAV genome”, “recombinant AAV vector genome”, “rAAV vector genome”, or simply “vector genome” or “recombinant vector genome”.

[0080] As used herein, an “expression cassette” refers to a nucleic acid molecule which comprises the coding sequences for human ABCD1 protein, promoter, and may include other regulatory sequences therefor, which cassette may be packaged into the capsid of a viral vector (e.g., a viral particle). Typically, such an expression cassette for generating an AAV vector contains the sequences described herein flanked by packaging signals or ITRs of the viral genome and other expression control sequences such as those described herein. For example, for an AAV viral vector, the packaging signals are the 5′ inverted terminal repeat (ITR) and the 3′ ITR. When packaged into the AAV capsid, the ITRs in conjunction with the expression cassette may be referred to herein as the “recombinant AAV (rAAV) genome” or “vector genome”.

[0081] As used herein, the term “regulatory sequences”, “transcriptional control sequence” or “expression control sequence” refers to DNA sequences, such as initiator sequences, enhancer sequences, and promoter sequences, which induce, repress, or otherwise control the transcription of protein encoding nucleic acid sequences to which they are operably linked.

[0082] As used herein, the term “operably linked” or “operatively associated” refers to both expression control sequences that are contiguous with the nucleic acid sequence encoding the human ABCD1 and/or expression control sequences that act in trans or at a distance to control the transcription and expression thereof.

[0083] In one aspect, a vector comprising any of the expression cassettes described herein is provided. As described herein, such vectors can be plasmids of variety of origins and are useful in certain embodiments for the generation of recombinant replication defective viruses as described further herein.

[0084] A “vector” as used herein is a nucleic acid molecule into which an exogenous or heterologous or engineered nucleic acid transgene may be inserted which can then be introduced into an appropriate host cell. Vectors preferably have one or more origin of replication, and one or more site into which the recombinant DNA can be inserted. Vectors often have means by which cells with vectors can be selected from those without, e.g., they encode drug resistance genes. Common vectors include plasmids, viral genomes, and (primarily in yeast and bacteria) “artificial chromosomes.” Certain plasmids are described herein.

[0085] In one embodiment, the vector is a non-viral plasmid that comprises an expression cassette described thereof, e.g., “naked DNA”, “naked plasmid DNA”, RNA, and mRNA; coupled with various compositions and nano particles, including, e.g., micelles, liposomes, cationic lipid-nucleic acid compositions, poly-glycan compositions and other polymers, lipid and/or cholesterol-based-nucleic acid conjugates, and other constructs such as are described herein. See, e.g., X. Su et al, Mol. Pharmaceutics, 2011, 8 (3), pp 774-787; web publication: Mar. 21, 2011; WO2013/182683, WO 2010/053572 and WO 2012/170930, all of which are incorporated herein by reference. Such non-viral human ABCD1 vector may be administered by the routes described herein. As used herein, the term “subject” as used herein means a mammalian animal, including a human, a veterinary or farm animal, a domestic animal or pet, and animals normally used for clinical research. In a preferred embodiment, the subject of these methods and compositions is a human. Still other suitable subjects include, without limitation, murine, rat, canine, feline, porcine, bovine, ovine, non-human primate and others. As used herein, the term “subject” is used interchangeably with “patient”.

[0086] The treated subject may comprise an individual diagnosed with adrenoleukodystrophy and/or adrenomyeloneuropathy or may exhibit symptoms associated with the onset of ALD or AMN such as the accumulation of high levels of saturated, very long chain fatty acids (VLCFA) in plasma or may be at risk of developing ALD or AMN because of family history or the individual may have been determined during genetic testing to comprise one or more mutations in the ABCD1 gene, e.g., a mutation which have been found to correlate to the development of ALD or AMN.

[0087] As mentioned the ABCD1 coding sequence in the AAV construction optionally may be codon optimized such that an increased number or percentage of the codons comprise human preferred codons. The term “percent (%) identity”, “sequence identity”, “percent sequence identity”, or “percent identical” in the context of nucleic acid sequences refers to the residues in the two sequences which are the same when aligned for correspondence. The length of sequence identity comparison may be over the full-length of the genome, the full-length of a gene coding sequence, or a fragment of at least about 500 to 5000 nucleotides, is desired. However, identity among smaller fragments, e.g. of at least about nine nucleotides, usually at least about 20 to 24 nucleotides, at least about 28 to 32 nucleotides, at least about 36 or more nucleotides, may also be desired.

[0088] Percent identity may be readily determined for amino acid sequences over the full-length of a protein, polypeptide, about 32 amino acids, about 330 amino acids, or a peptide fragment thereof or the corresponding nucleic acid sequence coding sequences. A suitable amino acid fragment may be at least about 8 amino acids in length and may be up to about 700 amino acids. Generally, when referring to “identity”, “homology”, or “similarity” between two different sequences, “identity”, “homology” or “similarity” is determined in reference to “aligned” sequences. “Aligned” sequences or “alignments” refer to multiple nucleic acid sequences or protein (amino acids) sequences, often containing corrections for missing or additional bases or amino acids as compared to a reference sequence.

[0089] Identity may be determined by preparing an alignment of the sequences and through the use of a variety of algorithms and/or computer programs known in the art or commercially available [e.g., BLAST, ExPASy; Clustal; FASTA; using, e.g., Needleman-Wunsch algorithm, Smith-Waterman algorithm]. Alignments are performed using any of a variety of publicly or commercially available Multiple Sequence Alignment Programs. Sequence alignment programs are available for amino acid sequences, e.g., the “Clustal Omega”, “Clustal X”, “MAP”, “PIMA”, “MSA”, “BloCKMAKER”, “MEME”, and “Match-Box” programs. Generally, any of these programs are used at default settings, although one of skill in the art can alter these settings as needed. Alternatively, one of skill in the art can utilize another algorithm or computer program which provides at least the level of identity or alignment as that provided by the referenced algorithms and programs. See, e.g., J. D. Thomson et al, “A comprehensive comparison of multiple sequence alignments”, Nucl. Acids. Res., 27(13):2682-2690 (1999).

[0090] Multiple sequence alignment programs are also available for nucleic acid sequences. Examples of such programs include, “Clustal Omega”, “Clustal W”, “CAP Sequence Assembly”, “BLAST”, “MAP”, and “MEME”, which are accessible through Web Servers on the internet. Other sources for such programs are known to those of skill in the art. Alternatively, SnapGene can be used. There are also a number of algorithms known in the art that can be used to measure nucleotide sequence identity, including those contained in the programs described above. As another example, polynucleotide sequences can be compared using Fasta™, a program in GCG Version 6.1. Fasta™ provides alignments and percent sequence identity of the regions of the best overlap between the query and search sequences. For instance, percent sequence identity between nucleic acid sequences can be determined using Fasta™ with its default parameters (a word size of 6 and the NOPAM factor for the scoring matrix) as provided in GCG Version 6.1, herein incorporated by reference.

[0091] The term “exogenous” as used to describe a nucleic acid sequence or protein means that the nucleic acid or protein does not naturally occur in the position in which it exists in a chromosome, or host cell. An exogenous nucleic acid sequence also refers to a sequence derived from and inserted into the same host cell or subject, but which is present in a non-natural state, e.g. a different copy number, or under the control of different regulatory elements.

[0092] The term “heterologous” as used to describe a nucleic acid sequence or protein means that the nucleic acid or protein was derived from a different organism or a different species of the same organism than the host cell or subject in which it is expressed. The term “heterologous” when used with reference to a protein or a nucleic acid in a plasmid, expression cassette, or vector, indicates that the protein or the nucleic acid is present with another sequence or subsequence with which the protein or nucleic acid in question is not found in the same relationship to each other in nature.

[0093] The term “isolated” means that the material is removed from its original environment (e.g., the natural environment if it is naturally occurring). For example, a naturally-occurring polynucleotide or polypeptide present in a living animal is not isolated, but the same polynucleotide or polypeptide, separated from some or all of the coexisting materials in the natural system, is isolated, even if subsequently reintroduced into the natural system. Such polynucleotides could be part of a vector and/or such polynucleotides or polypeptides could be part of a composition, and still be isolated in that such vector or composition is not part of its natural environment.

[0094] The term “terminator” as used herein encompasses nucleic acid sequences that terminate translation. For example, a terminator may be the RNA sequence “UAG”, “UGA”, or “UAA”, corresponding to the DNA sequences “TAG”, “TGA”, or “TAA”, respectively.

[0095] As used herein, the terms “alternative open reading frame”, “alternative reading frame”, or “alternative frame” each refer to a potential protein-coding sequence contained within the coding sequence of a gene of interest, e.g., ABCD1. An alternative open reading frame typically begins with a start codon (ATG) in the sense (or antisense) orientation that is in a different reading frame than the ABCD1 gene, e.g., in the +1 or +2 frame. Alternative open reading frames in the same orientation as the ABCD1 may result in transcription of alternative products that are potentially immunogenic and/or may result in reduced translation of the ABCD1 gene. Alternative open reading frames may be eliminated by introducing one or more mutations that remove the ATG sequence present in the alternative frame, which mutations are preferably silent with respect to the ABCD1 gene coding sequence (or alternatively may introduce a mutation in the ABCD1 sequence, such as a conservative mutation). Alternatively or in addition, a stop codon (TAA, TGA, or TAG) may be introduced in an alternative reading frames, e.g., downstream within a few codons of an ATG present in an alternative open reading frame, such that the encoded polypeptide is truncated, preferably to only one or a few amino acids. Moreover, the mutations introduced with respect to the ABCD1 coding sequence preferably avoid introducing rare codons that may result in slowed or reduced translation.

[0096] In exemplary embodiments, the ABCD1 coding sequence comprises one or more codon-optimized regions. Codon-optimized coding regions can be designed by various different methods. This optimization may be performed using methods which are available on-line (e.g., GeneArt), published methods, or a company which provides codon optimizing services, e.g., ATUM (Newark, CA). One codon optimizing method is described, e.g., in US International Patent Publication No. WO 2015/012924, which is incorporated by reference herein in its entirety. See also, e.g., US Patent Publication No. 2014/0032186 and US Patent Publication No. 2006/0136184. Suitably, the entire length of the open reading frame (ORF) for the product is modified. However, in some embodiments, only a fragment of the ORF may be altered. By using one of these methods, one can apply the frequencies to any given polypeptide sequence and produce a nucleic acid fragment of a codon-optimized coding region which encodes the polypeptide.

[0097] A number of de novo and recombinant options are available for performing the actual changes to the codons or for synthesizing codon-optimized coding regions. Such modifications or synthesis can be performed using standard and routine molecular biological manipulations well known to those of ordinary skill in the art. In one approach, a series of complementary oligonucleotide pairs of 80-90 nucleotides each in length and spanning the length of the desired sequence are synthesized by standard methods. These oligonucleotide pairs are synthesized such that upon annealing, they form double stranded fragments of 80-90 base pairs, containing cohesive ends, e.g., each oligonucleotide in the pair is synthesized to extend 3, 4, 5, 6, 7, 8, 9, 10, or more bases beyond the region that is complementary to the other oligonucleotide in the pair. The single-stranded ends of each pair of oligonucleotides are designed to anneal with the single-stranded end of another pair of oligonucleotides. The oligonucleotide pairs are allowed to anneal, and approximately five to six of these double-stranded fragments are then allowed to anneal together via the cohesive single stranded ends, and then they ligated together and cloned into a standard bacterial cloning vector, for example, a TOPO® vector available from Invitrogen Corporation, Carlsbad, Calif. The construct is then sequenced by standard methods. Several of these constructs consisting of 5 to 6 fragments of 80 to 90 base pair fragments ligated together, i.e., fragments of about 500 base pairs, are prepared, such that the entire desired sequence is represented in a series of plasmid constructs. The inserts of these plasmids are then cut with appropriate restriction enzymes and ligated together to form the final construct. The final construct is then cloned into a standard bacterial cloning vector, and sequenced. Such methods may also be used to construct coding sequences in which one or more alternative open reading frames have been eliminated. Additional methods would be immediately apparent to the skilled artisan. In addition, gene synthesis is readily available commercially.

[0098] By “engineered” is meant that the nucleic acid sequences encoding the ABCD1 protein described herein are assembled and placed into any suitable genetic element, e.g., naked DNA, phage, transposon, cosmid, episome, etc., which transfers the ABCD1 sequences carried thereon to a host cell, e.g., for generating non-viral delivery systems (e.g., RNA-based systems, naked DNA, or the like) or for generating viral vectors in a packaging host cell and/or for delivery to a host cells in a subject. In one embodiment, the genetic element is a plasmid. The methods used to make such engineered constructs are known to those with skill in nucleic acid manipulation and include genetic engineering, recombinant engineering, and synthetic techniques. See, e.g., Green and Sambrook, Molecular Cloning: A Laboratory Manual, Cold Spring Harbor Press, Cold Spring Harbor, NY (2012).

[0099] As used herein, the term “host cell” may refer to the packaging cell line in which a recombinant AAV is produced from a production plasmid. In the alternative, the term “host cell” may refer to any target cell in which expression of the coding sequence is desired. Thus, a “host cell,” refers to a prokaryotic or eukaryotic cell that contains exogenous or heterologous DNA that has been introduced into the cell by any means, e.g., electroporation, calcium phosphate precipitation, microinjection, transformation, viral infection, transfection, liposome delivery, membrane fusion techniques, high velocity DNA-coated pellets, viral infection and protoplast fusion. In certain embodiments herein, the term “host cell” refers to the cells employed to generate and package the viral vector or recombinant virus. In other embodiments herein, the term “host cell” refers to cultures of CNS cells of various mammalian species for in vitro assessment of the compositions described herein. Still in other embodiments, the term “host cell” is intended to reference the cells of the nervous system of the subject being treated in vivo for ALD or AMN disease.

[0100] Such host cells include epithelial cells of the CNS including ependyma, the epithelial lining of the brain ventricular system. Other host cells include neurons, astrocytes, oligodendrocytes, dorsal root ganglia and microglia.

[0101] As used herein, the term “treatment” or “treating” is defined encompassing administering to a subject one or more DNA constructs or compositions described herein for the purposes of amelioration of one or more symptoms of ALD or AMN. “Treatment” can thus include one or more of reducing onset or progression of ALD or AMN, preventing disease, reducing the severity of the disease symptoms, or retarding their progression, including the accumulation of high levels of saturated, very long chain fatty acids (VLCFA) in plasma and tissues of the brain, spinal cord, and adrenal cortex; adrenomyeloneuropathy (AMN); peripheral neuropathy due to affected dorsal root ganglia neurons (DRGs); onset of Addison's disease; “sudden” decreases in attention, thinking, concentration, and other cerebral functions; cerebral demyelination; among others.

[0102] The term “expression” is used herein in its broadest meaning and comprises the production of RNA or of RNA and protein. With respect to RNA, the term “expression” or “translation” relates in particular to the production of peptides or proteins. Expression may be transient or may be stable.

[0103] The term “translation” in the context of the present invention relates to a process at the ribosome, wherein an mRNA strand controls the assembly of an amino acid sequence to generate a protein or a peptide.

[0104] As used herein, “disease”, “disorder” and “condition” are used interchangeably, to indicate an abnormal state in a subject.

[0105] As used herein, the term “about” or “˜” means a variability of 10% from the reference given, unless otherwise specified.

[0106] The term “regulation” or variations thereof as used herein refers to the ability of a composition to inhibit one or more components of a biological pathway.

[0107] By “administering” as used in the methods means delivering the composition to the target selected cell which is characterized by a defect in the ABCD1 gene. In one embodiment, the method involves delivering the composition by intrathecal injection. In another embodiment, intracerebroventricular (ICV) injection to the subject is employed. In another embodiment, intrathecal-lumbar (IT-L) injection to the subject is employed. In still another method, intravascular injections may be employed. In another embodiment, intramuscular injection is employed. Generally, intrathecal administration is used. Still other methods of administration may be selected by one of skill in the art given this disclosure.

[0108] By “administering” or “route of administration” is delivery of composition described herein, with or without a pharmaceutical carrier or excipient, of the subject. Routes of administration may be combined, if desired. In some embodiments, the administration is repeated periodically. The pharmaceutical compositions described herein are designed for delivery to subjects in need thereof by any suitable route or a combination of different routes. In some embodiments, direct delivery to the brain (optionally via intrathecal, ICV or IT-L injection), or delivery via systemic routes is employed, e.g., intravascular, intraarterial, intraocular, intravenous, intramuscular, subcutaneous, intradermal, and other parental routes of administration. The nucleic acid molecules, the expression cassette and/or vectors described herein may be delivered in a single composition or multiple compositions. Optionally, two or more different AAV may be delivered, or multiple viruses [see, e.g., WO20 2011/126808 and WO 2013/049493] In another embodiment, multiple viruses may contain different replication-defective viruses (e.g., AAV and adenovirus), alone or in combination with proteins.

[0109] As used herein, the terms “intrathecal delivery” or “intrathecal administration” refer to a route of administration for drugs via an injection into the spinal canal, more specifically into the subarachnoid space so that it reaches the cerebrospinal fluid (CSF). Intrathecal delivery may include lumbar puncture, intraventricular (including intracerebroventricular (ICV)), suboccipital/intracisternal, and/or C 1-2 puncture. For example, material may be introduced for diffusion throughout the subarachnoid space by means of lumbar puncture. In another example, injection may be into the cisterna magna.

[0110] As used herein, the terms “intracisternal delivery” or “intracisternal administration” refer to a route of administration for drugs directly into the cerebrospinal fluid of the cisterna magna cerebellomedularis, more specifically via a suboccipital puncture or by direct injection into the cisterna magna or via permanently positioned tube. A device which is useful for delivering the compositions described herein into cerebrospinal fluid is described in PCT/US2017/16133, which is incorporated herein by reference.

[0111] Other definitions appear in context throughout this disclosure.

### Compositions and Methods

[0112] The invention provides improved AAV constructs (such as rAAV vector and rAAV genome vector) and cells and compositions containing wherein such AAV constructs contain a nucleic acid sequence encoding human ABCD1 protein (AAV-ABCD1 construct or AAV-hABCD1 construct), wherein such improved AAV-ABCD1 constructs may possess one or more of the following advantages: improved safety, improved packageability, enhanced ABCD1 expression levels, improved potency, improved stability, or reduced potential to express non-self-antigens.

[0113] Compositions and methods of the invention provide treatments for X-linked adrenoleukodystrophy (X-ALD) caused by mutations in the ABCD1 gene. Targeted, specific delivery of the ABCD1 gene to the CNS is expected to address the symptoms of adrenoleukodystrophy and/or adrenomyeloneuropathy. This can be achieved by administering an adeno-associated virus (AAV) vector encoding ABCD1. Described herein are exemplary AAV-hABCD1 vectors, which is sometimes referred to herein as AAV-ABCD1. The use of these terms is interchangeable. In addition, alternate embodiments are contemplated utilizing the components as described herein.

[0114] In certain embodiments of this invention, compositions comprising the subject DNA constructs or compositions containing are used for the treatment and/or prevention of adrenoleukodystrophy and/or adrenomyeloneuropathy and symptoms associated therewith in subjects in need thereof which symptoms include the accumulation of high levels of saturated, very long chain fatty acids (VLCFA) in plasma and tissues of the brain, spinal cord, and adrenal cortex, adrenomyeloneuropathy (AMN), and peripheral neuropathy due to affected dorsal root ganglia neurons.

[0115] The invention also provides methods of making such improved AAV constructs which contain a nucleic acid sequence encoding human ABCD1 protein (AAV-ABCD1 construct), and which constructs may possess one or more of the following advantages: improved safety, improved packageability, enhanced ABCD1 expression levels, improved stability, or reduced potential to express non-self-antigens which may be used for the treatment and/or prevention of adrenoleukodystrophy (ALD) and/or adrenomyeloneuropathy (AMN) in subjects in need thereof.

[0116] The invention also provides methods of delivering such improved AAV constructs by, e.g., intrathecal, intracerebroventricular (ICV), intrathecal-lumbar (IT-L), intravascular, intramuscular, or intracisternal administration which contain a nucleic acid sequence encoding human ABCD1 protein (AAV-ABCD1 construct), which constructs may possess one or more of the following advantages: improved safety, improved packageability, enhanced ABCD1 expression levels, improved stability, or reduced potential to express non-self-antigens for the treatment and/or prevention of adrenoleukodystrophy and/or adrenomyeloneuropathy in subjects in need thereof.

[0117] In some embodiments as described herein such improved AAV-ABCD1 constructs will lack a woodchuck post-transcriptional regulatory element (WPRE).

[0118] In other embodiments as described herein such improved AAV-ABCD1 constructs will comprise a modified woodchuck post-transcriptional regulatory element (WPRE) that comprises at least one mutation which eliminates expression of the X protein or which results in the expression of an inactivated or non-functional X protein, e.g., a truncated X protein.

[0119] In some embodiments as described herein such improved AAV-ABCD1 constructs will lack a woodchuck post-transcriptional regulatory element (WPRE).

[0120] In other embodiments as described herein such improved AAV-ABCD1 constructs will comprise a modified woodchuck post-transcriptional regulatory element (WPRE) that comprises at least one mutation which eliminates expression of the X protein or which results in the expression of an inactivated or non-functional X protein, e.g., a truncated X protein.

[0121] It is a specific object of the invention to provide novel recombinant AAV DNA constructs which is understood herein to encompass rAAV viral vectors with rAAV viral vector genome-encoding polynucleotides which express therapeutically sufficient amounts of the ALD protein in vivo which lack a potentially oncogenic transgene expression enhancer, such as a woodchuck post-transcriptional regulatory element (WPRE) or which comprise a WPRE which is modified to reduce or eliminate X protein expression and/or to result in expression of a variant of the X protein which is inactive (non-oncogenic).

[0122] It is a specific object of the invention to provide an isolated polynucleotide comprising a recombinant adeno-associated virus (rAAV) vector genome which may be packaged in viral capsids to form a rAAV virion, wherein said rAAV vector genome comprises or consists of: (a) a 5′ AAV inverted terminal repeat (ITR); (b) an expression cassette, wherein the expression cassette comprises at least (i) a promoter active in target cells, operably linked to (ii) a polynucleotide encoding an ATP-binding cassette, sub-family D, member 1 (ABCD1) polypeptide, (iii) one or more terminators and (iv) one or more poly A signal downstream of said ABCD1-encoding polynucleotide; and (c) a 3′ ITR. The rAAV vector genome may not comprise a woodchuck post-transcriptional regulatory element (WPRE) or may comprises a modified WPRE comprising at least one mutation which results in the X protein not being expressed or being expressed in an inactivated form (WPREx-inact).

[0123] In some instances, in the isolated polynucleotide provided by the invention, the 5′ and 3′ ITR, may be derived from the 5′ and 3′ ITR of any one of AAV1, AAV2, AAV3, AAV4, AAV5, AAV6, AAV7, AAV8, AAV9, AAVrh.10 (also referred to herein as AAVrh.10) serotypes, or a combination thereof.

[0124] In some instances, the 5′ and 3′ ITR may be derived from the 5′ and 3′ ITR of AAV2, AAV9, or AAVrh.10.

[0125] In some instances, the isolated polynucleotide does not comprise a woodchuck post-transcriptional regulatory element (WPRE).

[0126] In some instances, the isolated polynucleotide comprises a modified WPRE (WPREx-inact) comprising at least one mutation which results in the X protein not being expressed or being expressed in an inactivated form.

[0127] In some instances, in the isolated polynucleotide provided by the invention, (i) the 5′ ITR is derived from the 5′ ITR of AAV2; and/or (ii) the 3′ ITR is derived from the 3′ ITR of AAV2. Exemplary 5′ ITR and 3′ ITR sequences of AAV2 include but are not limited to the reference 5′ ITR and 3′ ITR sequences of SEQ ID NOS: 601 and 602, respectively, which are in an exemplary AAV2 complete genome reference sequence provided by Accession number: NC_001401.2. In some instances, in the isolated polynucleotide provided by the invention, (i) the 5′ ITR may comprise the nucleic acid sequence of SEQ ID NO: 301, 401, 601, 611, 10001, 10101, or 10201; and/or (ii) the 3′ ITR comprises the nucleic acid sequence of SEQ ID NO: 302, 402, 602, 612, 10018, 10118, or 10218.

[0128] In some instances, in the isolated polynucleotide provided by the invention, (i) the 5′ ITR may be a truncated form of the 5′ ITR of AAV2; and/or (ii) the 3′ ITR may be a truncated form of the 3′ ITR of AAV2. For example, (i) the truncated form of the 5′ ITR may comprise the nucleic acid sequence of SEQ ID NO: 2, 10501, 11001, 11101, 11201, 11301, 11501, or 11701; and/or (ii) the truncated form of the 3′ ITR may comprise the nucleic acid sequence of SEQ ID NO: 28, 10518, 11018, 11118, 11218, 11318, 11518, or 11718.

[0129] In some instances, the target cells of the rAAV vector which comprise the vector genome may be neurons or glial cells.

[0130] In some instances, the promoter contained in the vector genome may be selected from a cytomegalovirus (CMV) immediate early promoter, a viral simian virus 40 (SV40) (e.g., early or late), a Moloney murine leukemia virus (MoMLV) LTR promoter, a Rous sarcoma virus (RSV) LTR, a herpes simplex virus (HSV) (thymidine kinase) promoter, H5, P7.5, and PI 1 promoters from vaccinia virus, an elongation factor 1-alpha (EF1a) promoter, early growth response 1 (EGR1), ferritin H (FerH), ferritin L (FerL), Glyceraldehyde 3-phosphate dehydrogenase (GAPDH), eukaryotic translation initiation factor 4A1 (EIF4A1), heat shock 70 kDa protein 5 (HSPA5), heat shock protein 90 kDa beta, member 1 (HSP90B1), heat shock protein 70 kDa (HSP70), β-kinesin (β-KIN), the human ROSA 26 locus, a ubiquitin C promoter (UBC), a phosphoglycerate kinase-1 (PGK) promoter, a chicken β-actin (CAG) promoter, a Cytomegalovirus enhancer/chicken β-actin (CBA) promoter, a β-glucuronidase (GUSB) promoter, a JeT promoter, a β-actin promoter, optionally a chicken β-actin promoter; a tissue-specific promoter, a B29 promoter, a runt transcription factor (CBFa2) promoter, a CD14 promoter, a CD43 promoter, an CD45 promoter, a CD68 promoter, a CYP450 3A4 promoter, a desmin promoter, an elastase 1 promoter, an endoglin promoter, a fibroblast specific protein 1 promoter (FSP1) promoter, a fibronectin promoter, a fms-related tyrosine kinase 1 (FLT1) promoter, a glial fibrillary acidic protein (GFAP) promoter, an insulin promoter, an integrin, alpha 2b (ITGA2B) promoter, intracellular adhesion molecule 2 (ICAM-2) promoter, an interferon beta (IFN-β) promoter, a keratin 5 promoter (keratinocyte expression), a myoglobin (MB) promoter, a myogenic differentiation 1 (MYOD1) promoter, a nephrin promoter, a bone gamma-carboxyglutamate protein 2 (OG-2) promoter, an 3-oxoacid CoA transferase 2B (Oxct2B) promoter, a surfactant protein B (SP-B) promoter, a synapsin promoter, a Wiskott-Aldrich syndrome protein (WASP) promoter, or an MND promoter. An exemplary sequence of an EF1a promoter may be provided by, e.g., Accession No: J04617. An exemplary sequence of a UBC promoter may be provided by, e.g., Accession No: NG_027722.2. An exemplary sequence of a Cytomegalovirus enhancer/chicken β-actin promoter may be provided by, e.g., Accession No: NC_006273/X00182. An exemplary sequence of a JeT promoter may be provided by, e.g., Tornse J, Kusk P, Johansen T E, Jensen P R. “Generation of a synthetic mammalian promoter library by modification of sequences spacing transcription factor binding sites”, Gene. 2002 Sep. 4; 297(1-2):21-32 (doi: 10.1016/s0378-1119(02)00878-8; PMID: 12384282). An exemplary sequence of a GUSB promoter may be provided by, e.g., Accession No: M65002.

[0131] In some instances, the promoter contained in the viral genome may comprise a chicken β-actin promoter (also referred to as CBA promoter herein), optionally wherein the chicken β-actin promoter comprises the nucleic acid sequence of SEQ ID NO: 10, 10007, 10107, 10207, 10507, 11007, 11107, 11207, 11307, 11507, or 11707, or a nucleic acid sequence having at least 95%, 96%, 97%, 98%, or 99% identity thereto.

[0132] In some instances, the promoter contained in the viral genome may be operably linked to an enhancer, selected from a CMV enhancer, RSV enhancer, Alpha fetoprotein enhancer, TTR minimal promoter/enhancer, LSP enhancer, APB enhancer, ABPS enhancer, alpha mic/bik enhancer, TTR enhancer, en34 enhancer, or a ApoE enhancer.

[0133] In some instances, the promoter contained in the viral genome may be operably linked to an enhancer, optionally wherein the enhancer is a CMV enhancer or a myeloproliferative sarcoma virus enhancer.

[0134] In some instances, the promoter contained in the viral genome is operably linked to a CMV enhancer, optionally wherein the CMV enhancer comprises the nucleic acid sequence of SEQ ID NO: 7, 10005, 10105, 10205, 10505, 11005, 11105, 11205, 11305, 11505, or 11705, or a nucleic acid sequence having at least 95%, 96%, 97%, 98%, or 99% identity thereto.

[0135] In some instances, the promoter contained in the viral genome comprises a CMV enhancer, a chicken β-actin promoter, β-actin exon, a chimeric intron, a rabbit beta-globin exon, optionally in the direction from the 5′ end to the 3′ end.

[0136] In certain instances, (i) the CMV enhancer may comprise the nucleic acid sequence of SEQ ID NO: 7, 10005, 10105, 10205, 10505, 11005, 11105, 11205, 11305, 11505, or 11705, or a nucleic acid sequence having at least 95%, 96%, 97%, 98%, or 99% identity thereto; (ii) the chicken β-actin promoter may comprise the nucleic acid sequence of SEQ ID NO: 10, 10007, 10107, 10207, 10507, 11007, 11107, 11207, 11307, 11507, or 11707, or a nucleic acid sequence having at least 95%, 96%, 97%, 98%, or 99% identity thereto; (iii) the β-actin exon may comprise the nucleic acid sequence of SEQ ID NO: 11, 10008, 10108, 10208, 10508, 11008, 11108, 11208, 11308, 11508, or 11708, or a nucleic acid sequence having at least 95%, 96%, 97%, 98%, or 99% identity thereto; (iv) the chimeric intron may comprise the nucleic acid sequence of SEQ ID NO: 12, 10009, 10109, 10209, 10509, 11009, 11109, 11209, 11309, 11509, or 11709, or a nucleic acid sequence having at least 95%, 96%, 97%, 98%, or 99% identity thereto; and/or the rabbit beta-globin exon may comprise the nucleic acid sequence of SEQ ID NO: 10085, 10185, 10285, 10585, 11085, 11185, 11285, 11385, 11585, or 11785, or a nucleic acid sequence having at least 95%, 96%, 97%, 98%, or 99% identity thereto.

[0137] In some instances, the ABCD1 polypeptide encoded by the rAAV vector genome may comprise the amino acid sequence encoded by the nucleic acid sequence of SEQ ID NO: 14, 204, 304, 404, 501, 502, 503, 504, 505, 506, 507, 508, 509, 5010, 10012, 10112, 10212, 10512, 11012, 11112, 11212, 11312, 11512, or 11712, or a nucleic acid sequence having at least 95%, 96%, 97%, 98%, or 99% identity thereto.

[0138] In some instances, the ABCD1 coding sequence comprised in the rAAV vector genome may contain a reduced number of alternative open reading frames relative to the nucleic acid sequence of SEQ ID NO: 204 or does not contain any alternative open reading frames.

[0139] In some instances, the ABCD1 coding sequence may be predominantly (over 50, 60, 70, 80, 90 or 95%) or entirely of comprised of human preferred codons.

[0140] In some instances, the ABCD1-encoding polynucleotide comprises the nucleic acid sequence of SEQ ID NO: 14, 204, 304, 404, 501, 502, 503, 504, 505, 506, 507, 508, 509, 5010, 10012, 10112, 10212, 10512, 11012, 11112, 11212, 11312, 11512, or 11712, or a nucleic acid sequence having at least 95%, 96%, 97%, 98%, or 99% identity thereto.

[0141] In some instances, the rAAV vector genome further comprising a Kozak sequence immediately upstream of the ABCD1-encoding polynucleotide, and optionally the Kozak sequence may comprise the nucleic acid sequence of SEQ ID NO: 10511, 11211, or 11311 or any sequence representing an approach to the consensus sequence for optimal protein translation initiation: ‘GCCRCCATGG’.

[0142] In some instances, the rAAV vector genome comprises one or more terminator(s) individually selected from UAG, UAA, and/or UGA. In certain instances, the rAAV vector genome may comprise a terminator comprising the nucleic acid sequence of SEQ ID NO: 10071, 10171, 10271, 10571, 11071, 11171, 11271, 11371, 11571, or 11771. In certain instances, the rAAV vector genome may further comprise another terminator comprising the nucleic acid sequence of SEQ ID NO: 10572, 11272, or 11372.

[0143] In some instances, the poly A signal contained in the rAAV vector genome may comprise at least one polyA signal consisting of bGH, hGH, SV40, RGB, mRGB, or a synthetic poly A signal. In some instances, the poly A signal contained in the rAAV vector genome may comprise two or more poly A signals operably linked downstream to the ABCD1-encoding polynucleotide.

[0144] In some instances the polyA signal contained in the rAAV vector genome may comprise an SV40 poly A signal, and optionally the SV40 poly A signal may comprise the nucleic acid sequence of SEQ ID NO: 27, 10014, 10114, 10214, 10514, 11014, 11214, or 11714, or a nucleic acid sequence having at least 95%, 96%, 97%, 98%, or 99% identity thereto.

[0145] In some instances, the poly A signal contained in the rAAV vector genome may comprise an bGH poly A signal, and optionally the bGH poly A signal may comprise the nucleic acid sequence of SEQ ID NO: 10016, 10116, 10216, 11016, 11116, 11216, 11316, 11516, or 101716, or a nucleic acid sequence having at least 95%, 96%, 97%, 98%, or 99% identity thereto.

[0146] In some instances, the poly A signal contained in the rAAV vector genome may comprise the nucleic acid sequence of SEQ ID NO: 206, 306, 405, 10035, 10135, 10235, 10535, 11035, 11135, 11235, 11335, 11535, or 11735, or a nucleic acid sequence having at least 95%, 96%, 97%, 98%, or 99% identity thereto.

[0147] In some instances, in the rAAV vector genome, (a) the 5′ ITR may comprise the nucleic acid sequence of SEQ ID NO: 301, 401, 10001, 10101, 10201, 2, 10501, 11001, 11101, 11201, 11301, 11501, or 101701; (b), in the expression cassette, (i) the promoter may comprise the nucleic acid sequence of SEQ ID NO: 10, 10007, 10107, 10207, 10507, 11007, 11107, 11207, 11307, 11507, or 11707, 303, 403, (ii) the ABCD1-encoding polynucleotide may comprise the nucleic acid sequence of SEQ ID NO: 14, 204, 304, 404, 501, 502, 503, 504, 505, 506, 507, 508, 509, 5010, 10012, 10112, 10212, 10512, 11012, 11112, 11212, 11312, 1512, or 11712, and (iii) the poly A signal may comprise the nucleic acid sequence of SEQ ID NO: 27, 10014, 10114, 10214, 10514, 11014, 11214, 11714, 10016, 10116, 10216, 11016, 11116, 11216, 11316, 11516, 11716, 306, 405, 10035, 10135, 10235, 11035, 11235, or 11735; and (c) the 3′ ITR may comprise the nucleic acid sequence of SEQ ID NO: 302, 402, 602, 612, 28, 10018, 10118, 10218, 10518, 11018, 11118, 11218, 11318, 11518, or 11718.

[0148] In certain instances, the rAAV vector genome may comprise or consist of the nucleic acid sequence of SEQ ID NO: 300, 400, 10050, 10150, 10250, 10550, 11050, 11150, 11250, 11350, 11550, or 11750, the nucleotides 1-3713 of the nucleic acid sequence of SEQ ID NO: 100, or SEQ ID NO: 10060, 10160, 10260, 10560, 11060, 11160, 11260, 11360, 11560, or 101760 or a nucleic acid sequence having at least 95%, 96%, 97%, 98%, or 99% identity thereto.

[0149] In certain instances, the rAAV vector genome further comprises a modified woodchuck post-transcriptional regulatory element (WPRE) that comprises at least one mutation which eliminates expression of the X protein or which results in the expression of an inactivated or non-functional X protein (WPREx-inact). For example, the inactivated or non-functional X protein is a truncated X protein. In a specific example, the modified WPRE comprises the nucleic acid sequence of SEQ ID NO: 305 or 10075.

[0150] In certain instances, the isolated polynucleotide provided by the invention may comprise the rAAV vector genome which comprises or consists of the nucleic acid sequence of SEQ ID NO: 300, 10050, or 10060.

[0151] In certain instances, the isolated polynucleotide provided by the invention may be a plasmid, preferably a high-copy plasmid (500-1000 copies/cell) in a host cell under specific growth conditions (e.g., pUC18, pUC19, pUC57, or pUC118). The plasmid may optionally encode an antibiotic-resistance gene, which may optionally be a kanamycin-resistance gene. In particular examples, the plasmid may comprise a pUC57 or pUC118 backbone. In certain instances, the isolated polynucleotide provided by the invention may be a plasmid which comprises, consists of, or is derived from the plasmid pSBT101, pOB1005, pOB1010, pOB1011, pOB1012, pOB1013, pOB1015, or pOB1017, or the plasmid that encodes the genome of AAV-CBA-ABCD1-WPRE(Xinact).

[0152] In certain instances, the isolated polynucleotide provided by the invention may be a plasmid which comprises or consists of the nucleic acid sequence of SEQ ID NO: 100, 10000, 10100, 10500, 11000, 11100, 11200, 11300, 11500, or 11700, or a nucleic acid sequence having at least 95%, 96%, 97%, 98%, or 99% identity thereto.

[0153] It is a specific object of the invention to provide a composition comprising: (A) the isolated polynucleotide according to any of the polynucleotide described above, optionally further comprising any one or more of: (B) a transfection reagent; (C) a polynucleotide which comprises an AAV capsid (cap) gene; (D) a polynucleotide which comprises an AAV replication (rep) gene; (E) a polynucleotide which comprises adenovirus helper genes selected from the group consisting of E1 region, E2 region, E4 region, and VA RNA region; and/or (F) a pharmaceutically acceptable carrier or excipient.

[0154] In some instances, the transfection reagent is polyethylenimine (PEI) or a PEI derivative such as PEIpro®. In some other instances, the transfection reagent may be Lipofectamine™ FuGENE®, or TransIT®. In some instances, (i) the AAV cap gene may be derived from the cap gene of AAV1, AAV2, AAV3, AAV4, AAV5, AAV6, AAV7, AAV8, AAV9, and AAVrh.10, preferably of AAV2, AAV9, or AAVrh.10; and/or (ii) the AAV rep gene may be derived from the rep gene of AAV1, AAV2, AAV3, AAV4, AAV5, AAV6, AAV7, AAV8, AAV9, and AAVrh.10, preferably of AAV2, AAV9, or AAVrh.10.

[0155] In some embodiments, the rep gene and the cap gene may be provided by a separate plasmid to a packaging cell. In some embodiments, the packaging cell is engineered to express the cap gene and/or the rep gene. In certain instances, the rep gene may be transcribed by (i.e., transcription is controlled by) the p5 and/or p40 promoter and the cap gene may be transcribed by the p40 promoter.

[0156] In some embodiments, the rep gene and the cap gene may be provided by a Rep/Cap plasmid. In certain embodiments, the Rep/Cap plasmid comprises a p5 promoter, p19 promoter, and p40 promoter. In certain instances, the rep gene may be transcribed by the p5 and/or the p40 promoter and the cap gene may be transcribed by the p40 promoter.

[0157] In some embodiments, the Rep/Cap plasmid may be entirely derived from AAV1, AAV2, AAV3, AAV4, AAV5, AAV6, AAV7, AAV8, AAV9, or AAVrh.10, while in some embodiments, the Rep/Cap plasmid may be of a hybrid serotype, such as AAV2/9, which comprise elements from AAV2 and elements from AAV9.

[0158] In certain embodiments, when the Rep/Cap plasmid is of AAV2/9 serotype, the Rep gene may be of AAV2 and the Cap gene may be of AAV9.

[0159] In such embodiments, the Rep/Cap plasmid may comprise an AAV2 p5 promoter (which may comprise the nucleic acid sequence of SEQ ID NO: 710), an AAV2 p19 promoter (which may comprise the nucleic acid sequence of SEQ ID NO: 720), and a AAV p40 promoter (which may comprise the nucleic acid sequence of SEQ ID NO: 730).

[0160] In some embodiments the capsid (cap) gene may be the capsid gene or a variant thereof of AAV serotypes AAV1, AAV2, AAV3, AAV4, AAV5, AAV6, AAV7, AAV8, AAV9, or AAVrh.10 encoding for VP1, VP2, and/or VP3 capsid proteins.

[0161] In some embodiments, the cap gene products are transcribed by the AAV p40 promoter. In certain embodiments, the AAV p40 promoter may comprise the nucleic acid sequence of SEQ ID NO: 730.

[0162] In certain embodiments, the capsid gene may be or may be derived from the capsid gene of AAV2, AAV9 or AAV10rh.10.

[0163] In some embodiments, when the capsid gene (Cap gene) is derived from that of AAV9, three capsid gene products VP1, VP2, and VP3 of AAV9 may be encoded. In certain instances, the VP1, VP2, and VP3 of AAV9 may be transcribed by the p40 promoter. In certain instances, the VP1 AAV9 may comprise the amino acid sequences of SEQ ID NO: 731. In certain instances, the VP2 of AAV9 may comprise the amino acid sequences of SEQ ID NO: 732. In certain instances, the VP3 of AAV9 may comprise the amino acid sequences of SEQ ID NO: 733.

[0164] In some embodiments, when the capsid gene (Cap gene) is or is derived from that of AAV2, three capsid gene products VP1, VP2, and VP3 of AAV2 may be produced. In certain instances, the VP1 of AAV2 may comprise the amino acid sequences of SEQ ID NO: 831. In certain instances, the VP2 of AAV2 may comprise the amino acid sequences of SEQ ID NO: 832. In certain instances, the VP3 of AAV2 may comprise the amino acid sequences of SEQ ID NO: 833.

[0165] In some embodiments, when the capsid gene (Cap gene) is derived from that of AAVrh.10, three capsid gene products VP1, VP2, and VP3 of AAVrh.10 may be produced. In certain instances, the VP1 of AAVrh.10 may comprise the amino acid sequences of SEQ ID NO: 931. In certain instances, the VP2 of AAVrh.10 may comprise the amino acid sequences of SEQ ID NO: 932. In certain instances, the VP3 of AAVrh.10 may comprise the amino acid sequences of SEQ ID NO: 933.

[0166] In some instances, an exemplary AAVrh.10 capsid sequence may be provided by, e.g., GeneBank #AY243015 (nucleic acid sequence) and/or Accession No. AA088201.1 (amino acid sequence) and/or by, e.g., Gao G. et al., J Virol. 2004 June; 78(12):6381-8.

[0167] In some embodiments the replication gene may be the replication gene or a variant thereof of AAV serotypes AAV1, AAV2, AAV3, AAV4, AAV5, AAV6, AAV7, AAV8, AAV9, or AAVrh.10 encoding for Rep 78, Rep 68, Rep 52, and/or Rep 40 proteins. In some embodiments, the replicon gene(s) may be transcribed by the p5 promoter and/or the p19 promoter.

[0168] In some embodiments, the replication gene may be the replication gene or a variant thereof of AAV2, AAV9, or AAVrh.10.

[0169] In certain embodiments, two replication gene products, REP78 and REP68, may be transcribed by the p5 promoter. In certain embodiments two replication gene products, REP52 and REP40, may be transcribed by the p19 promoter.

[0170] In some embodiments, when the replication gene (rep gene) is or is derived from that of AAV2, the replication gene products Rep78, Rep68, Rep52, and/or Rep40 of AAV2 may be produced. In certain instances, the Rep78 and/or Rep68 of AAV2 may be transcribed by the AAV2 p5 promoter, and the Rep52 and/or Rep40 may be transcribed by the AAV2 p19 promoter.

[0171] In certain embodiments, the AAV2 p5 promoter may comprise the nucleic acid sequence of SEQ ID NO: 710 and/or the AAV2 p19 promoter may comprise the nucleic acid sequence of SEQ ID NO: 720.

[0172] In certain embodiments, the gene product Rep78 of AAV2 may comprise the amino acid sequences of SEQ ID NO: 711. In certain instances, the gene product Rep68 of AAV2 may comprise the amino acid sequences of SEQ ID NO: 712. In certain instances, the gene product Rep52 of AAV2 may comprise the amino acid sequences of SEQ ID NO: 721. In certain instances, the gene product Rep40 of AAV2 may comprise the amino acid sequences of SEQ ID NO: 722.

[0173] In specific embodiments, when the Rep/Cap plasmid is an AAV2/9 plasmid, such as the plasmid referred to herein as “pAAV2/9”, the plasmid may comprise: an AAV2 p5 promoter (SEQ ID NO: 710) from which AAV2 REP78 (SEQ ID NO: 711) and AAV2 REP68 (SEQ ID NO: 712) may be produced; an AAV2 p19 promoter (SEQ ID NO: 720) from which AAV2 REP52 (SEQ ID NO: 721) and AAV2 REP40 (SEQ ID NO: 722) may be produced; and a AAV p40 promoter (SEQ ID NO: 730) from which AAV9 VP1 (SEQ ID NO: 731), AAV9 VP2 (SEQ ID NO: 732), and AAV9 VP3 (SEQ ID NO: 733) may be produced. In some specific instances, the full construct sequence of such a pAAV2/9 plasmid may have the nucleic acid sequence of SEQ ID NO: 700.

[0174] In certain instances, in a pAAV2/9 Rep/Cap plasmid, the REP40 and REP68 genes may share a second exon that resides within the CAP VP1 sequence. In certain instances, there may be a variation of the last several amino acids (e.g., three amino acids) encoded by the small second exon of REP 40 and REP 68. For example, when REP40 and REP68 comprise the amino acid sequence of SEQ ID NO: 722 and 712, respectively, both the REP 40 and REP 68 products end with the amino acid sequence LARGQP. This differs from the REP 40 and REP 68 sequences of natural AAV2, both of which end with the amino acid sequence LARGHSL.

[0175] In some instances, the AAV cap gene may encode the amino acid sequence of SEQ ID NOS: 731, 732, and/or 733, or an amino acid sequence having at least 95%, 96%, 97%, 98%, 99% identity thereto.

[0176] In some instances, the AAV cap gene may encode the amino acid sequence of SEQ ID NOS: 831, 832, and/or 833, or an amino acid sequence having at least 95%, 96%, 97%, 98%, 99% identity thereto.

[0177] In some instances, the AAV cap gene may encode the amino acid sequence of SEQ ID NOS: 931, 932, and/or 933, or an amino acid sequence having at least 95%, 96%, 97%, 98%, 99% identity thereto.

[0178] In some instances, the AAV rep gene may encode the amino acid sequence of SEQ ID NOS: 711, 712, 721, and/or 722, or an amino acid sequence having at least 95%, 96%, 97%, 98%, or 99% identity thereto.

[0179] In some embodiments, a polynucleotide which comprises one or more helper gene(s), such as one or more adenovirus helper gene(s), one or more herpes simplex virus helper gene(s), one or more papillomavirus helper gene(s), and/or one or more vaccinia virus helper gene(s), may be comprised in a composition which may be used for producing an rAAV viral vector according to the present invention.

[0180] In some embodiments, when one or more adenovirus helper gene(s) is contained, the adenovirus helper gene(s) may be derived from Adenovirus 5 (Ad5) and/or Adenovirus 2 (Ad2). In some instances, the adenovirus helper gene(s) may be derived from wild-type (WT) Ad5, and in certain instances, the WT Ad5 may comprise a genome comprising the nucleic acid sequence of SEQ ID NO: 2000. In some instances, the adenovirus helper gene(s) may be derived from wild-type (WT) Ad2, and in certain instances, the WT Ad2 may comprise a genome comprising the nucleic acid sequence of SEQ ID NO: 3000.

[0181] In some embodiments, when one or more adenovirus helper gene(s) is contained, the adenovirus helper gene(s) may comprise the E1 region, E2 region, E4 region, and/or VA RNA region. In some embodiments, the adenovirus helper gene(s) may comprise the VA RNA region, E2 region, and E4 region.

[0182] In some embodiments, one or more adenovirus helper gene(s) may be provided by an AAV helper virus, which may be provided by an AAV virus helper plasmid (or simply referred to as “virus helper plasmid” herein).

[0183] In some embodiments, one or more Ad5 helper gene(s) may be provided by an Ad5 helper virus, which may be provided by an Ad5 virus helper plasmid. Non-limiting examples of such an Ad5 virus helper plasmid include the plasmid referred to herein as pALD-X80.

[0184] In some embodiments, an Ad5 virus helper plasmid may comprise an Ad5 VA RNA region, an Ad5 E2 region, and/or an Ad5 E4 region. In some instances, the Ad5 VA RNA region may comprise the nucleic acid sequence of SEQ ID NO: 2010. In some instances, the Ad5 E2 region may comprise the nucleic acid sequence of SEQ ID NO: 2020. In some instances, the Ad5 E4 region may comprise the nucleic acid sequence of SEQ ID NO: 2030. For example, an exemplary plasmid, pALD-X80, comprises these sequences.

[0185] In some embodiments, an Ad5 VA RNA region may comprise an Ad5 VA-RNA region I (VA RNA I) and an Ad5 VA-RNA region II (VA RNA II). In some instances, the Ad5 VA-RNA region I (VA RNA I) may comprise the nucleic acid sequence of SEQ ID NO: 2011. In some instances, the Ad5 VA-RNA region II (VA RNA II) may comprise the nucleic acid sequence of SEQ ID NO: 2012.

[0186] In some embodiments, an Ad5 E2 region may encode Hexon (C-terminal fragment); 23K endoprotease; E2A/DBP; Hexon Assembly (100K); Hexon Assembly (33K); Hexon Assembly (22K); and/or Hexon-associated precursor. In some instances, such Hexon (C-terminal fragment) may comprise the amino acid sequence of SEQ ID NO: 2021. In some instances, such 23K endoprotease may comprise the amino acid sequence of SEQ ID NO: 2022. In some instances, such E2A/DBP may comprise the amino acid sequence of SEQ ID NO: 2023. In some instances, such Hexon Assembly (100K) may comprise the amino acid sequence of SEQ ID NO: 2024. In some instances, such Hexon Assembly (33K) may comprise the amino acid sequence of SEQ ID NO: 2025. In some instances, such Hexon Assembly (22K) may comprise the amino acid sequence of SEQ ID NO: 2026. In some instances, such Hexon-associated precursor may comprise the amino acid sequence of SEQ ID NO: 2027.

[0187] In some embodiments, an Ad5 E4 region may encode: Fiber; E4 ORF1; E4 ORF2; E4 ORF3; E4 ORF4; E4 ORF6; and/or E4 ORF6/7. In some instances, Fiber may comprise the amino acid sequence of SEQ ID NO: 2031. In some instances, E4 ORF1 may comprise the amino acid sequence of SEQ ID NO: 2032. In some instances, E4 ORF2 may comprise the amino acid sequence of SEQ ID NO: 2033. In some instances, E4 ORF3 may comprise the amino acid sequence of SEQ ID NO: 2034. In some instances, E4 ORF4 may comprise the amino acid sequence of SEQ ID NO: 2035. In some instances, E4 ORF6 may comprise the amino acid sequence of SEQ ID NO: 2036. In some instances, E4 ORF6/7 may comprise the amino acid sequence of SEQ ID NO: 2037.

[0188] In some specific embodiments, one or more adenovirus helper gene(s) may be provided by the pALD-X80 plasmid or an Ad5 virus helper plasmid.

[0189] In some specific embodiments an Ad5 virus helper plasmid may comprise: the Ad5 Region VA-RNA (SEQ ID NO: 2010) containing VA-RNA region (VA RNA I) (SEQ ID NO: 2011) and/or VA-RNA region (VA RNA II) (SEQ ID NO: 2012); Ad5 Region E2 (SEQ ID NO: 2020) encoding Hexon (C-terminal fragment) (SEQ ID NO: 2021), 23K endoprotease (SEQ ID NO: 2022), E2A/DBP (SEQ ID NO: 2023), Hexon Assembly (100K) (SEQ ID NO: 2024), Hexon Assembly (33K) (SEQ ID NO: 2025), Hexon Assembly (22K) (SEQ ID NO: 2026), and Hexon-associated precursor (SEQ ID NO: 2027); and Ad5 Region E4 (SEQ ID NO: 2030) encoding Fiber (SEQ ID NO: 2031), E4 ORF1 (SEQ ID NO: 2032), E4 ORF2 (SEQ ID NO: 2033), E4 ORF3 (SEQ ID NO: 2034), E4 ORF4 (SEQ ID NO: 2035), E4 ORF6 (SEQ ID NO: 2036), and/or E4 ORF6/7 (SEQ ID NO: 2037).

[0190] pALD-X80 comprises: the Ad5 Region VA-RNA (SEQ ID NO: 2010) containing VA-RNA region (VA RNA I) (SEQ ID NO: 2011) and/or VA-RNA region (VA RNA II) (SEQ ID NO: 2012); Ad5 Region E2 (SEQ ID NO: 2020) encoding Hexon (C-terminal fragment) (SEQ ID NO: 2021), 23K endoprotease (SEQ ID NO: 2022), E2A/DBP (SEQ ID NO: 2023), Hexon Assembly (100K) (SEQ ID NO: 2024), Hexon Assembly (33K) (SEQ ID NO: 2025), Hexon Assembly (22K) (SEQ ID NO: 2026), and Hexon-associated precursor (SEQ ID NO: 2027); and Ad5 Region E4 (SEQ ID NO: 2030) encoding Fiber (SEQ ID NO: 2031), E4 ORF1 (SEQ ID NO: 2032), E4 ORF2 (SEQ ID NO: 2033), E4 ORF3 (SEQ ID NO: 2034), E4 ORF4 (SEQ ID NO: 2035), E4 ORF6 (SEQ ID NO: 2036), and/or E4 ORF6/7 (SEQ ID NO: 2037).

[0191] In some embodiments, one or more Ad2 helper gene(s) may be provided by an Ad2 helper virus, which may be provided by an Ad2 virus helper plasmid. Non-limiting examples of such an Ad2 virus helper plasmid may include the plasmid referred to herein as pHELP-KanV4.

[0192] In some embodiments, an Ad2 virus helper plasmid may comprise an Ad2 VA RNA region, an Ad2 E2 region, and/or an Ad2 E4 region. In some instances, the Ad2 VA RNA region may comprise the nucleic acid sequence of SEQ ID NO: 3010. In some instances, the Ad2 E2 region may comprise the nucleic acid sequence of SEQ ID NO: 3020. In some instances, the Ad2 E4 region may comprise the nucleic acid sequence of SEQ ID NO: 3030. For example, an exemplary plasmid, pHELP-KanV4, comprises these sequences.

[0193] In some embodiments, an Ad2 VA RNA region may comprise an Ad2 VA-RNA region I (VA RNA I) and an Ad2 VA-RNA region II (VA RNA II). In some instances, the Ad2 VA-RNA region I (VA RNA I) may comprise the nucleic acid sequence of SEQ ID NO: 3011. In some instances, the Ad2 VA-RNA region II (VA RNA II) may comprise the nucleic acid sequence of SEQ ID NO: 3012.

[0194] In some embodiments, an Ad2 E2 region may encode 23K endoprotease (C-terminal fragment); E2A/DBP; Hexon Assembly (100K); Hexon Assembly (33K); Hexon Assembly (22K); and/or Hexon-associated precursor. In some instances, such 23K endoprotease (C-terminal fragment) may comprise the amino acid sequence of SEQ ID NO: 3022. In some instances, such E2A/DBP may comprise the amino acid sequence of SEQ ID NO: 3023. In some instances, such Hexon Assembly (100K) may comprise the amino acid sequence of SEQ ID NO: 3024. In some instances, such Hexon Assembly (33K) may comprise the amino acid sequence of SEQ ID NO: 3025. In some instances, such Hexon Assembly (22K) may comprise the amino acid sequence of SEQ ID NO: 3026. In some instances, such Hexon-associated precursor may comprise the amino acid sequence of SEQ ID NO: 3027.

[0195] In some embodiments, an Ad2 E4 region may encode: E4 ORF1; E4 ORF2; E4 ORF3; E4 ORF4; E4 ORF6; and/or E4 ORF6/7. In some instances, In some instances, such E4 ORF1 may comprise the amino acid sequence of SEQ ID NO: 3032. In some instances, such E4 ORF2 may comprise the amino acid sequence of SEQ ID NO: 3033. In some instances, such E4 ORF3 may comprise the amino acid sequence of SEQ ID NO: 3034. In some instances, such E4 ORF4 may comprise the amino acid sequence of SEQ ID NO: 3035. In some instances, such E4 ORF6 may comprise the amino acid sequence of SEQ ID NO: 3036. In some instances, such E4 ORF6/7 may comprise the amino acid sequence of SEQ ID NO: 3037.

[0196] In some specific embodiments, one or more adenovirus helper gene(s) may be provided by the pHELP_KanV4 plasmid, an Ad2 virus helper plasmid.

[0197] In some specific embodiments an Ad2 virus helper plasmid may comprise: the Ad2 Region VA-RNA (SEQ ID NO: 3010) containing VA-RNA region (VA RNA I) (SEQ ID NO: 3011) and/or VA-RNA region (VA RNA II) (SEQ ID NO: 3012); Ad2 Region E2 (SEQ ID NO: 3020) encoding 23K endoprotease (C-terminal fragment) (SEQ ID NO: 3022), E2A/DBP (SEQ ID NO: 3023), Hexon Assembly (100K) (SEQ ID NO: 3024), Hexon Assembly (33K) (SEQ ID NO: 3025), Hexon Assembly (22K) (SEQ ID NO: 3026), and Hexon-associated precursor (SEQ ID NO: 3027); and Ad2 Region E4 (SEQ ID NO: 3030) encoding E4 ORF1 (SEQ ID NO: 3032), E4 ORF2 (SEQ ID NO: 3033), E4 ORF3 (SEQ ID NO: 3034), E4 ORF4 (SEQ ID NO: 3035), E4 ORF6 (SEQ ID NO: 3036), and/or E4 ORF6/7 (SEQ ID NO: 3037).

[0198] pHELP_KanV4 comprises: the Ad2 Region VA-RNA (SEQ ID NO: 3010) containing VA-RNA region (VA RNA I) (SEQ ID NO: 3011) and/or VA-RNA region (VA RNA II) (SEQ ID NO: 3012); Ad2 Region E2 (SEQ ID NO: 3020) encoding 23K endoprotease (C-terminal fragment) (SEQ ID NO: 3022), E2A/DBP (SEQ ID NO: 3023), Hexon Assembly (100K) (SEQ ID NO: 3024), Hexon Assembly (33K) (SEQ ID NO: 3025), Hexon Assembly (22K) (SEQ ID NO: 3026), and Hexon-associated precursor (SEQ ID NO: 3027); and Ad2 Region E4 (SEQ ID NO: 3030) encoding E4 ORF1 (SEQ ID NO: 3032), E4 ORF2 (SEQ ID NO: 3033), E4 ORF3 (SEQ ID NO: 3034), E4 ORF4 (SEQ ID NO: 3035), E4 ORF6 (SEQ ID NO: 3036), and/or E4 ORF6/7 (SEQ ID NO: 3037).

[0199] In further embodiments, any of the helper virus genes such as any of the adenoviral helper genes may be provided by a packaging cell engineered to express any of such genes.

[0200] It is a specific object of the invention to provide a recombinant AAV (rAAV) vector comprising or consisting of: (I) an AAV capsid; and (II) a rAAV vector genome according to any of the rAAV vector genomes described above.

[0201] In some instances, the AAV capsid may be an AAV1, AAV2, AAV3, AAV4, AAV5, AAV6, AAV7, AAV8, AAV9, or AAVrh.10 capsid, preferably an AAV2, AAV9, or AAVrh.10 capsid, or a variant thereof.

[0202] In some instances, the AAV capsid may comprise or consist of the amino acid sequence of SEQ ID NO: 731 or an amino acid sequence having at least 95%, 96%, 97%, 98%, or 99% identity thereto.

[0203] In some instances, the AAV capsid may comprise or consist of the amino acid sequence of SEQ ID NO: 732 or an amino acid sequence having at least 95%, 96%, 97%, 98%, or 99% identity thereto.

[0204] In some instances, the AAV capsid may comprise or consist of the amino acid sequence of SEQ ID NO: 733 or an amino acid sequence having at least 95%, 96%, 97%, 98%, or 99% identity thereto.

[0205] In certain instances, the rAAV vector (i.e., the rAAV viral particle) may comprise an AAV9 VP1 capsid protein, an AAV9 VP2 capsid protein, and an AAV9 VP3 capsid protein. In some specific instances, the rAAV vector may comprise: (a) an AAV9 VP1 capsid protein comprising the amino acid sequence of SEQ ID NO: 731 or an amino acid sequence having at least 95%, 96%, 97%, 98%, or 99% identity thereto; (b) an AAV9 VP2 capsid protein comprising the amino acid sequence of SEQ ID NO: 732 or an amino acid sequence having at least 95%, 96%, 97%, 98%, or 99% identity thereto; and (c) an AAV9 VP3 capsid protein comprising the amino acid sequence of SEQ ID NO: 732 or an amino acid sequence having at least 95%, 96%, 97%, 98%, or 99% identity thereto.

[0206] In some instances, the AAV capsid may comprise or consist of the amino acid sequence of SEQ ID NO: 831 or an amino acid sequence having at least 95%, 96%, 97%, 98%, or 99% identity thereto.

[0207] In some instances, the AAV capsid may comprise or consist of the amino acid sequence of SEQ ID NO: 832 or an amino acid sequence having at least 95%, 96%, 97%, 98%, or 99% identity thereto.

[0208] In some instances, the AAV capsid may comprise or consist of the amino acid sequence of SEQ ID NO: 833 or an amino acid sequence having at least 95%, 96%, 97%, 98%, or 99% identity thereto.

[0209] In certain instances, the rAAV vector (i.e., the rAAV viral particle) may comprise an AAV2 VP1 capsid protein, an AAV2 VP2 capsid protein, and an AAV2 VP3 capsid protein. In some specific instances, the rAAV vector may comprise: (a) an AAV2 VP1 capsid protein comprising the amino acid sequence of SEQ ID NO: 831 or an amino acid sequence having at least 95%, 96%, 97%, 98%, or 99% identity thereto; (b) an AAV2 VP2 capsid protein comprising the amino acid sequence of SEQ ID NO: 832 or an amino acid sequence having at least 95%, 96%, 97%, 98%, or 99% identity thereto; and (c) an AAV2 VP3 capsid protein comprising the amino acid sequence of SEQ ID NO: 832 or an amino acid sequence having at least 95%, 96%, 97%, 98%, or 99% identity thereto.

[0210] In some instances, the AAV capsid may comprise or consist of the amino acid sequence of SEQ ID NO: 931 or an amino acid sequence having at least 95%, 96%, 97%, 98%, or 99% identity thereto.

[0211] In some instances, the AAV capsid may comprise or consist of the amino acid sequence of SEQ ID NO: 932 or an amino acid sequence having at least 95%, 96%, 97%, 98%, or 99% identity thereto.

[0212] In some instances, the AAV capsid may comprise or consist of the amino acid sequence of SEQ ID NO: 933 or an amino acid sequence having at least 95%, 96%, 97%, 98%, or 99% identity thereto.

[0213] In certain instances, the rAAV vector (i.e., the rAAV viral particle) may comprise an AAVrh.10 VP1 capsid protein, an AAVrh10 VP2 capsid protein, and an AAVrh.10 VP3 capsid protein. In some specific instances, the rAAV vector may comprise: (a) an AAVrh.10 VP1 capsid protein comprising the amino acid sequence of SEQ ID NO: 931 or an amino acid sequence having at least 95%, 96%, 97%, 98%, or 99% identity thereto; (b) an AAVrh.10 VP2 capsid protein comprising the amino acid sequence of SEQ ID NO: 932 or an amino acid sequence having at least 95%, 96%, 97%, 98%, or 99% identity thereto; and (c) an AAVrh.10 VP3 capsid protein comprising the amino acid sequence of SEQ ID NO: 932 or an amino acid sequence having at least 95%, 96%, 97%, 98%, or 99% identity thereto.

[0214] It is also a specific object of the invention to provide a composition suitable for in vivo administration which comprises: (A) a prophylactically or therapeutically effective amount of any of the rAAV vector described herein; and (B) a pharmaceutically acceptable carrier.

[0215] In some instances, the composition may comprise a dose of the rAAV vector of between about 1×10¹³ genome copies (GC) and about 1×10¹⁵ GC.

[0216] It is also a specific object of the invention to provide several compositions, each composition according the composition described above, which in the aggregate may comprise a total dose of the rAAV vector of between about 1×10¹³ GC and about 1×10¹⁵ GC.

[0217] In some instances, in any of the composition or compositions as described above, the dose of the rAAV vector may be comprised in a volume of between about 10 mL and about 150 mL.

[0218] In some instances, in any of the composition or compositions as described above, the dose of the rAAV vector may be comprised in a volume of about 10 mL, about 20 mL, about 30 mL, about 40 mL, about 50 mL, about 60 mL, about 70 mL, about 80 mL, about 90 mL, about 100 mL, about 110 mL, about 120 mL, about 130 mL, about 140 mL, or about 150 mL.

[0219] In some instances, any of the composition or compositions as described above may be suitable for intrathecal, intracerebroventricular (ICV), intrathecal-lumbar (IT-L), intravascular, intramuscular, or intracisternal administration.

[0220] In some instances, any of the composition or compositions as described above may be suitable for intrathecal administration.

[0221] In some instances, any of the composition or compositions as described above may be suitable for intrathecal administration by a pump. It is another specific object of the invention to provide methods of treating and/or preventing ALD or AMN in subjects and/or ameliorating symptoms associated with ALD and/or AMN in need thereof comprising administering to a subject in need thereof a prophylactically or therapeutically effective amount of at least one of any polynucleotides as described above, at least one of any rAAV vectors as described above, and/or at least one or more of any of the compositions as described above.

[0222] In some instances, the subject is human.

[0223] In some instances, the method alleviates, reduces or stabilizes one or more symptoms in the subject such as the accumulation of high levels of saturated, very long chain fatty acids (VLCFA) in plasma and tissues of the brain, spinal cord, and adrenal cortex, adrenomyeloneuropathy (AMN), or peripheral neuropathy due to affected dorsal root ganglia neurons.

[0224] In some instances, the isolated polynucleotide, rAAV vector, or composition or compositions is/are delivered by intrathecal, intracerebroventricular (ICV), intrathecal-lumbar (IT-L), intravascular, intramuscular, or intracisternal administration.

[0225] In some instances, the delivery is by intrathecal administration.

[0226] In some instances, the intrathecal administration is mediated by a pump.

[0227] In some instances, when a rAAV vector or a composition comprising a rAAV is administered, the total administered dose of the rAAV vector may be about 1×10¹³ GC to about 1×10¹⁵ GC.

[0228] In some instances, the isolated polynucleotide, rAAV vector, or composition or compositions may be administered in a volume of between about 10 mL and about 150 mL.

[0229] In some instances, the isolated polynucleotide, rAAV vector, or composition or compositions may be administered in a volume of about 10 mL, about 20 mL, about 30 mL, about 40 mL, about 50 mL, about 60 mL, about 70 mL, about 80 mL, about 90 mL, about 100 mL, about 110 mL, about 120 mL, about 130 mL, about 140 mL, or about 150 mL, preferably about 100 mL.

[0230] In some instances, the isolated polynucleotide, rAAV vector, or composition or compositions may be delivered in a single dose or multiple doses.

[0231] In some instances, the rAAV vector may comprise an AAV9, AAV2, or AAVrh.10 capsid.

[0232] It is another specific object of the invention to provide a method of making a viral vector.

[0233] In some instances, the method may comprise introducing any of the isolated polynucleotides described above in a packaging host cell. Optionally, the viral vector to which the vector genome contained in the polynucleotide may be packaged may be a rAAV vector comprising an AAV2, AAV9, or AAVrh.10 capsid.

[0234] In some instances, the method may comprise culturing a packaging cell comprising any of the rAAV vector genomes as described above. Optionally, the viral vector may be a rAAV vector comprising an AAV2, AAV9, or AAVrh.10 capsid. Further optionally, the packaging cell may comprise a polynucleotide encoding an AAV cap and/or an AAV rep.

[0235] It is another specific object of the invention to provide a cell comprising any of the rAAV vector genome as described above. Such a cell may be useful for producing any of the rAAV vectors described herein. Optionally, the cell comprises a polynucleotide encoding an AAV cap and/or an AAV rep. Alternatively, when the cell does not comprise a polynucleotide encoding an AAV cap and/or an AAV rep, a polynucleotide encoding an AAV cap and/or an AAV rep may be introduced to the cell during production of any of the rAAV vectors described herein.

[0236] It is also an object of the invention to provide an AAV 5′ ITR variant and/or AAV 3′ ITR variant, which comprise(s) a shortened A region sequence. When such an AAV 5′ ITR and/or an AAV 3′ ITR variant are flanking an expression cassette comprising a gene of interest (GOI) in an AAV genome, such an AAV 5′ ITR and/or an AAV 3′ ITR variant may be useful for enhancing the expression of the (GOI).

[0237] In some instances, the AAV 5′ ITR variant may comprise or consists of the nucleic acid sequence of SEQ ID NO: 2, 10501, 11001, 11101, 11201, 11301, 11501, or 11701.

[0238] In some instances, the AAV 3′ ITR variant may comprise or consists of the nucleic acid sequence of SEQ ID NO: 28, 10518, 11018, 11118, 11218, 11318, 11518, or 11718.

[0239] It is further an object of the invention to provide an isolated polynucleotide comprising a rAAV vector genome, comprising or consisting: (a) any of the AAV 5′ ITR variants comprising a shortened A region sequence as described above; (b) an expression cassette, comprising at least (i) a promoter active in target cells, operably linked to (ii) a polynucleotide encoding gene of interest (GOI), and (iii) one or more poly A signal downstream of said GOI-encoding polynucleotide; and (c) any of the AAV 3′ ITR variants comprising a shortened A region sequence as described above.

[0240] In some instances, the polynucleotide may be is a plasmid, optionally comprising a pUC57 or pUC118 backbone.

[0241] It is yet an object of the invention to provide a composition comprising: (A) an isolated polynucleotide comprising a rAAV vector genome, comprising or consisting: (A-a) any of the AAV 5′ ITR variants comprising a shortened A region sequence as described above; (A-b) an expression cassette, comprising at least (i) a promoter active in target cells, operably linked to (ii) a polynucleotide encoding gene of interest (GOI), and (iii) one or more poly A signal downstream of said GOI-encoding polynucleotide; and (A-c) any of the AAV 3′ ITR variants comprising a shortened A region sequence as described above.

[0242] In some instances, the composition may further comprise any one or more of: (B) a transfection reagent; (C) a polynucleotide which comprises an AAV capsid (cap) gene; (D) a polynucleotide which comprises an AAV replication (rep) gene; (E) a cell comprising a polynucleotide which comprises an AAV cap gene; (F) a cell comprising a polynucleotide which comprises an AAV rep gene; and/or (G) a pharmaceutically acceptable carrier or excipient.

[0243] In certain instances, in the AAV vector genome contained in the polynucleotide, (i) the AAV cap gene may be derived from the cap gene of AAV1, AAV2, AAV3, AAV4, AAV5, AAV6, AAV7, AAV8, AAV9, and AAVrh.10, preferably of AAV2, AAV9, or AAVrh.10; and/or (ii) the AAV rep gene may be derived from the rep gene of AAV1, AAV2, AAV3, AAV4, AAV5, AAV6, AAV7, AAV8, AAV9, and AAVrh.10, preferably of AAV2, AAV9, or AAVrh.10.

[0244] It is also an object of the invention to provide a cell comprising any of the isolated polynucleotide comprising a rAAV vector genome which comprises or consists of: (a) any of the AAV 5′ ITR variants comprising a shortened A region sequence as described above; (b) an expression cassette, comprising at least (i) a promoter active in target cells, operably linked to (ii) a polynucleotide encoding gene of interest (GOI), and (iii) one or more poly A signal downstream of said GOI-encoding polynucleotide; and (c) any of the AAV 3′ ITR variants comprising a shortened A region sequence as described above.

[0245] In some instances, the cell may further comprise a polynucleotide encoding an AAV cap and/or an AAV rep.

[0246] It is also an object of the invention to provide a rAAV vector comprising or consisting of: (I) an AAV capsid; and (II) a rAAV vector genome according to the rAAV vector genome which comprises or consists of: (a) any of the AAV 5′ ITR variants comprising a shortened A region sequence as described above; (b) an expression cassette, comprising at least (i) a promoter active in target cells, operably linked to (ii) a polynucleotide encoding gene of interest (GOI), and (iii) one or more poly A signal downstream of said GOI-encoding polynucleotide; and (c) any of the AAV 3′ ITR variants comprising a shortened A region sequence as described above.

[0247] In some instances, the AAV capsid is an AAV1, AAV2, AAV3, AAV4, AAV5, AAV6, AAV7, AAV8, AAV9, or AAVrh.10 capsid, preferably an AAV2, AAV9, or AAVrh.10 capsid, or a variant thereof.

[0248] It is also an object of the invention to provide a composition or compositions suitable for in vivo administration which comprises a prophylactically or therapeutically effective amount of the rAAV vector comprising or consisting of: (I) an AAV capsid; and (II) a rAAV vector genome according to the rAAV vector genome which comprises or consists of: (II-a) any of the AAV 5′ ITR variants comprising a shortened A region sequence as described above; (II-b) an expression cassette, comprising at least (i) a promoter active in target cells, operably linked to (ii) a polynucleotide encoding gene of interest (GOI), and (iii) one or more poly A signal downstream of said GOI-encoding polynucleotide; and (II-c) any of the AAV 3′ ITR variants comprising a shortened A region sequence as described above.

[0249] In some instances, the composition or compositions may further comprise a pharmaceutically acceptable carrier.

[0250] It is also an object of the invention to provide a method of gene therapy in a subject in need thereof comprising administering to a subject in need thereof a prophylactically or therapeutically effective amount of: (A) at least one rAAV vector comprising or consisting of (I) an AAV capsid and (II) a rAAV vector genome according to the rAAV vector genome which comprises or consists of (II-a) any of the AAV 5′ ITR variants comprising a shortened A region sequence as described above, (II-b) an expression cassette, comprising at least (i) a promoter active in target cells, operably linked to (ii) a polynucleotide encoding gene of interest (GOI), and (iii) one or more poly A signal downstream of said GOI-encoding polynucleotide, and (II-c) any of the AAV 3′ ITR variants comprising a shortened A region sequence as described above; or (B) composition or compositions comprising such a rAAV vector.

[0251] It is also an object of the invention to provide a method of making a viral vector, comprising introducing into a packaging cell the isolated polynucleotide comprising a rAAV vector genome which comprises or consists of: (a) any of the AAV 5′ ITR variants comprising a shortened A region sequence as described above; (b) an expression cassette, comprising at least (i) a promoter active in target cells, operably linked to (ii) a polynucleotide encoding gene of interest (GOI), and (iii) one or more poly A signal downstream of said GOI-encoding polynucleotide; and (c) any of the AAV 3′ ITR variants comprising a shortened A region sequence as described above.

[0252] In some instances, the viral vector is a rAAV vector comprising an AAV2, AAV9, or AAVrh.10 capsid.

[0253] It is yet an object of the invention to provide a method of making a viral vector, comprising culturing a packaging cell comprising a rAAV vector genome which comprises or consists of: (a) any of the AAV 5′ ITR variants comprising a shortened A region sequence as described above; (b) an expression cassette, comprising at least (i) a promoter active in target cells, operably linked to (ii) a polynucleotide encoding gene of interest (GOI), and (iii) one or more poly A signal downstream of said GOI-encoding polynucleotide; and (c) any of the AAV 3′ ITR variants comprising a shortened A region sequence as described above.

[0254] In some instances, the viral vector is a rAAV vector comprising an AAV2, AAV9, or AAVrh.10 capsid.

[0255] In certain instances, the packaging cell comprises a polynucleotide encoding an AAV cap and/or an AAV rep.

[0256] In some embodiments such improved AAV-ABCD1 constructs will comprise an ABCD1 coding sequence modified to contain fewer alternative open reading frames relative to the ABCD1 coding sequence contained in SEQ ID NO: 200 or will not contain any alternative open reading frames. Alternatively, or in addition, the ABCD1 coding sequence may be modified to remove internal Kozak or Kozak-like sequences, preferably by the introduction of mutations that are silent with respect to the ABCD1 coding sequence. Alternatively or in addition, the ABCD1 coding sequence will be modified, preferably by the introduction of silent mutations, to remove one or more of: (i) TATA-boxes (ii) chi-sites, (iii) ribosomal entry sites, (iv) ARE sequence elements, (v) INS sequence elements, (vi) CRS sequence elements and/or (vii) cryptic splice donor and acceptor sites. Such modifications are expected to avoid any potential to express non-self-antigens and/or improve expression of ABCD1.

[0257] In some embodiments such improved AAV-ABCD1 constructs will comprise a Kozak sequence, such as ‘CCACC’ or ‘GCCACC’, or any sequence representing an approach to the consensus sequence for optimal protein translation initiation: ‘GCCRCCATGG)’ upstream of the ABCD1 start site.

[0258] In some embodiments such improved AAV-ABCD1 constructs will only comprise a single polyA site downstream of the ABCD1 gene (such as SV40 polyA sequence and/or a BGH polyA sequence, or other suitable polyA sequence including synthetic polyA) to reduce the size of the ABCD1 transgene cassette.

[0259] In some embodiments such improved AAV-ABCD1 constructs may comprise multiple polyA sites downstream of the ABCD1 gene (such as SV40 polyA sequence and a BGH polyA sequence, or other suitable polyA sequence including synthetic polyA).

[0260] In some embodiments such improved AAV-ABCD1 constructs will comprise an shortened or truncated AAV 3′ ITR.

[0261] In some embodiments such improved AAV-ABCD1 constructs will be comprised on a pUC57 or pUC118 backbone.

[0262] In other embodiments such improved AAV-ABCD1 constructs will comprise a human ABCD1 coding sequence which is predominantly (over 50, 60, 70, 80, 90 or 95%) or entirely of comprised of human preferred codons.

[0263] In other embodiments such improved AAV-ABCD1 constructs will comprise a human ABCD1 coding sequence selected from those of SEQ ID NO: 204, SEQ ID NO: 304, SEQ ID NO: 404, SEQ ID NO: 501-510, SEQ ID NO: 14, and SEQ ID NOS: 10012, 10112, 10212, 10512, 11012, 11112, 11212, 11312, 11512, and 11712.

[0264] In some embodiments, such improved AAV-ABCD1 constructs may comprise or be derived from pSBT101.

[0265] In some embodiments, such improved AAV-ABCD1 constructs (AAV vectors, AAV vector genomes, or vector genome-encoding polynucleotides) may comprise or be derived from pOB1005, pOB1010, pOB1011, pOB1012, pOB1013, pOB1015, or pOB1017.

[0266] In some preferred embodiments, such improved AAV-ABCD1 constructs may comprise or be derived from pSBT101, pOB1010, pOB1015, or pOB1017.

[0267] In some preferred embodiments, such improved AAV-ABCD1 vector genome may be the vector genome encoded in the plasmid pSBT101, pOB1010, pOB1015, or pOB1017.

[0268] In some preferred embodiments, such improved AAV-ABCD1 vector genome-encoding polynucleotides may comprise or be derived from pSBT101, pOB1010, pOB1015, or pOB1017.

[0269] In some preferred embodiments, such improved AAV-ABCD1 vector genome may be produced from pSBT101, pOB1010, pOB1015, or pOB1017.

[0270] In some preferred embodiments, such improved AAV-ABCD1 vector genome may be the vector genome of SBT101, OB1010, OB1015, or OB1017.

[0271] In other embodiments, such improved AAV-ABCD1 constructs (AAV vectors, AAV vector genomes, or vector genome-encoding polynucleotides) may comprise or be derived from the genome of AAV-CBA-ABCD1-WPRE (Xinact), e.g., the AAV-ABCD1 vector genome may comprise or consist of the nucleic acid sequence of SEQ ID NO: 10050 or 10060.

[0272] In other embodiments, such improved AAV-ABCD1 constructs (AAV vectors, AAV vector genomes, or vector genome-encoding polynucleotides) may comprise or be derived from the genome of AAV-CBA-ABCD1 [no WPRE], e.g., such vector genome may comprise or consist of the nucleic acid sequence of SEQ ID NO: 10250 or 10260.

[0273] In other embodiments, such improved AAV-ABCD1 constructs (AAV vectors, AAV vector genomes, or vector genome-encoding polynucleotides) may comprise or be derived from pSBT101, e.g., the AAV-ABCD1 vector genome may comprise or consist of the nucleic acid sequence of SEQ ID NO: 10150 or 10160.

[0274] In other embodiments, such improved AAV-ABCD1 constructs (AAV vectors, AAV vector genomes, or vector genome-encoding polynucleotides) may comprise or be derived from pOB1005, e.g., the AAV-ABCD1 vector genome may comprise or consist of the nucleic acid sequence of SEQ ID NOS: 10550 or 10560 or nucleotides 1-3713 inclusive of pOB1005 (SEQ ID NO: 100).

[0275] In other embodiments, such improved AAV-ABCD1 constructs (AAV vectors, AAV vector genomes, or vector genome-encoding polynucleotides) may comprise or be derived from pOB1010, e.g., the AAV-ABCD1 vector genome may comprise or consist of the nucleic acid sequence of SEQ ID NO: 11050 or 11060.

[0276] In other embodiments, such improved AAV-ABCD1 constructs (AAV vectors, AAV vector genomes, or vector genome-encoding polynucleotides) may comprise or be derived from pOB1011, e.g., the AAV-ABCD1 vector genome may comprise or consist of the nucleic acid sequence of SEQ ID NO: 11150 or 11160.

[0277] In other embodiments, such improved AAV-ABCD1 constructs (AAV vectors, AAV vector genomes, or vector genome-encoding polynucleotides) may comprise or be derived from pOB1012, e.g., the AAV-ABCD1 vector genome may comprise or consist of the nucleic acid sequence of SEQ ID NO: 11250 or 11260.

[0278] In other embodiments, such improved AAV-ABCD1 constructs (AAV vectors, AAV vector genomes, or vector genome-encoding polynucleotides) may comprise or be derived from pOB1013, e.g., the AAV-ABCD1 vector genome may comprise or consist of the nucleic acid sequence of SEQ ID NO: 11350 or 11360.

[0279] In other embodiments, such improved AAV-ABCD1 constructs (AAV vectors, AAV vector genomes, or vector genome-encoding polynucleotides) may comprise or be derived from pOB1015, e.g., the AAV-ABCD1 vector genome may comprise or consist of the nucleic acid sequence of SEQ ID NO: 11550 or 11560.

[0280] In other embodiments, such improved AAV-ABCD1 constructs (AAV vectors, AAV vector genomes, or vector genome-encoding polynucleotides) may comprise or be derived from pOB1017, e.g., the AAV-ABCD1 vector genome may comprise or consist of the nucleic acid sequence of SEQ ID NO: 11750 or 11760.

[0281] In some embodiments such improved AAV-ABCD1 constructs will only comprise a single polyA site downstream of the ABCD1 gene (such as SV40 polyA sequence and/or a BGH polyA sequence, or other suitable polyA sequence including synthetic polyA) to reduce the size of the ABCD1 transgene cassette.

[0282] In some embodiments such improved AAV-ABCD1 constructs may comprise multiple polyA sites downstream of the ABCD1 gene (such as SV40 polyA sequence and a BGH polyA sequence, or other suitable polyA sequence including synthetic polyA).

[0283] In some embodiments such improved AAV-ABCD1 constructs will comprise a shortened or truncated AAV 3′ ITR.

[0284] In specific embodiments the improved AAV-ABCD1 construct may comprise (i) 5′ and 3′ AAV ITR sequences from any AAV serotype, e.g., AAV2, AAV9, or AAVrh.10 ITR sequences which ITR sequences may flank the following sequences (ii) a promoter operable in cells of the central nervous system (such as neurons or glial cells) such as a hybrid promoter, which, for example, comprises a CMV immediate early enhancer (also referred to herein as CMV enhancer) upstream of a chicken beta actin promoter, beta actin exon, a chimeric intron, and a rabbit beta-globin exon, which is upstream of (iii) a human ABCD1 coding sequence which ABCD1 coding sequence optionally may be modified e.g., to remove start or stop codons, to be comprised of human preferred codons and/or by the addition of a KOZAK sequence, such as ‘CCACC’, at the 5′ end thereof and/or may comprise a human ABCD1 coding sequence selected from those of SEQ ID NO: 204, SEQ ID NO: 304, SEQ ID NO: 404, SEQ ID NO: 501-510, SEQ ID NO: 14, and SEQ ID NOS: 10012, 10112, 10212, 10512, 11012, 11112, 11212, 11312, 11512, and 11712, (iv) optionally a modified WPRE sequence which WPRE if present is modified to eliminate X protein expression or is mutated such that it encodes an inactive form of the X protein and (v) at least one polyA sequence downstream of the ABCD1 coding sequence and modified WPRE sequence if present such as a SV40 polyA sequence and/or a BGH polyA sequence, or other suitable polyA sequence including synthetic polyA.

[0285] In specific embodiments the improved AAV-ABCD1 construct may comprise pOB1005 (SEQ ID NO: 100 or 10500) or nucleotides 1-3713 inclusive of pOB1005, AAV-CBA-hABCD1-WPREXinact (SEQ ID NO: 300 or 10000) or AAV-CBA-hABCD1 (SEQ ID NO: 400 or 10200), pSBT101 (SEQ ID NO: 10100), pOB1010 (SEQ ID NO: 11000), pOB1011 (SEQ ID NO: 11100), pOB1012 (SEQ ID NO: 11200), pOB1013 (SEQ ID NO: 11300), pOB1015 (SEQ ID NO: 11500), or pOB1017 (SEQ ID NO: 11700), or may comprise a variant of any of the foregoing which is modified e.g., to comprise a human ABCD1 coding sequence selected from those of SEQ ID NO: 204, SEQ ID NO: 304, SEQ ID NO: 404, SEQ ID NO: 501-510, SEQ ID NO: 14, and SEQ ID NOS: 10012, 10112, 10212, 10512, 11012, 11112, 11212, 11312, 11512, and 11712, or the promoter used to regulate ABCD1 expression is substituted with another promoter operable in cells of the central nervous system (such as neurons or glial cells) e.g., one selected from those afore-mentioned or the WPRE is eliminated or a different mutated WPRE may be inserted which is mutated to eliminate X protein expression or is modified to express an inactive (e.g., truncated or otherwise modified inactive X protein) such as the modified WPRE in SEQ ID NO: 305 or 10075 or is modified by the insertion of a KOZAK sequence, such as ‘CCACC’, or any sequence representing an approach to the consensus sequence for optimal protein translation initiation: ‘GCCRCCATGG)’ before the ABCD1 coding sequence or is modified by the replacement of the polyA signal sequences contained in any of the foregoing constructs with another polyA sequence or by the replacement of the AAV2 ITR sequences with ITR sequences derived from other AAV's and the like and combinations of any of the foregoing.

[0286] In one embodiment, the nucleic acid sequence encoding human ABCD1 in the construct may further comprise a nucleic acid encoding a tag polypeptide covalently linked thereto. The tag polypeptide may be selected from known “epitope tags” including, without limitation, a myc tag polypeptide, a glutathione-S-transferase tag polypeptide, a green fluorescent protein tag polypeptide, a His6 tag polypeptide, an influenza virus hemagglutinin tag polypeptide, a flag tag polypeptide, and a maltose binding protein tag polypeptide.

[0287] In another aspect, an expression cassette comprising a nucleic acid sequence that encodes human ABCD1 is provided. In one embodiment, the sequence is a codon or otherwise optimized sequence as afore-described.

[0288] In another embodiment, an expression cassette for use in an AAV vector is provided. In that embodiment, the AAV expression cassette includes at least one AAV inverted terminal repeat (ITR) sequence. In another embodiment, the expression cassette comprises 5′ ITR sequences and 3′ ITR sequences. In one embodiment, the 5′ and 3′ ITRs flank the nucleic acid sequence that encodes human ABCD1 and optionally a modified WPRE, optionally with additional sequences which direct expression of the sequence that encodes human ABCD1 in a host cell. Thus, as described herein, an AAV expression cassette is meant to describe an expression cassette as described above flanked on its 5′ end by a 5′AAV inverted terminal repeat sequence (ITR) and on its 3′ end by a 3′ AAV ITR. Thus, this rAAV genome contains the minimal sequences required to package the expression cassette into an AAV viral particle, i.e., the AAV 5′ and 3′ ITRs. The AAV ITRs may be obtained from the ITR sequences of any AAV, such as described herein. These ITRs may be of the same AAV origin as the capsid employed in the resulting recombinant AAV, or of a different AAV origin (to produce an AAV pseudotype). In one embodiment, the ITR sequences from AAV2, AAV9, or AAVrh.10, or the deleted, shortened, or truncated version thereof are used for convenience and to accelerate regulatory approval. However, ITRs from other AAV sources may be selected. Where the source of the ITRs is from AAV2 and the AAV capsid is from another AAV source, the resulting vector may be termed pseudotyped. Typically, the AAV vector genome comprises an AAV 5′ ITR, the human ABCD1 coding sequences and suitable regulatory sequences, and an AAV 3′ ITR. However, other configurations of these elements may be suitable. Each rAAV genome can be then introduced into a production plasmid. Exemplary shortened 5′ ITR sequences include, but are not limited to, the nucleic acid sequence of SEQ ID NOS: 10501, 11001, 11101, 11201, 11301, 11501, and 11701. Exemplary shortened 3′ ITR sequences include, but are not limited to, the nucleic acid sequence of SEQ ID NOS: 10518, 11018, 11118, 11218, 11318, 11518, and 11718.

[0289] In one aspect, a vector comprising any of the expression cassettes described herein is provided. As described herein, such vectors can be plasmids of variety of origins and are useful in certain embodiments for the generation of recombinant replication defective viruses as described further herein.

[0290] In another embodiment, the vector is a viral vector that comprises an expression cassette described therein. In one embodiment, an expression cassette as described herein may be engineered onto a plasmid which is used for drug delivery or for production of a viral vector. Suitable viral vectors are preferably replication defective and selected from amongst those which target brain cells. Viral vectors may include any virus suitable for gene therapy, including but not limited to adenovirus; herpes virus; lentivirus; retrovirus; parvovirus, etc. However, herein an adeno-associated virus is the embodied virus vector. The viral vectors, or non-viral vectors, can be formulated with a physiologically acceptable carrier for use in gene transfer and gene therapy applications.

[0291] In another embodiment, a recombinant adeno-associated virus (rAAV) vector is provided. The rAAV compromises an AAV capsid, and a vector genome packaged therein.

[0292] The vector genome comprises, in one embodiment: (a) an AAV 5′ inverted terminal repeat (ITR) sequence; (b) a promoter; (c) a coding sequence encoding a human ABCD1; and (d) an AAV 3′ ITR.

[0293] Adeno-associated virus (AAV), a member of the Parvovirus family, is a small nonenveloped, icosahedral virus with single-stranded linear DNA genomes of 4.7 kilobases (kb) to 5 kb. Among known AAV serotypes are AAV1, AAV2, AAV3, AAV4, AAV5, AAV6, AAV7, AAV8, AAV9, AAVrh.10, and others. The ITRs or other AAV components may be readily isolated or engineered using techniques available to those of skill in the art from an AAV. Such AAV may be isolated, engineered, or obtained from academic, commercial, or public sources (e.g., the American Type Culture Collection, Manassas, VA). Alternatively, the AAV sequences may be engineered through synthetic or other suitable means by reference to published sequences such as are available in the literature or in databases such as, e.g., GenBank, PubMed, or the like. AAV viruses may be engineered by conventional molecular biology techniques, making it possible to optimize these particles for cell specific delivery of nucleic acid sequences, for minimizing immunogenicity, for tuning stability and particle lifetime, for efficient degradation, for accurate delivery to the nucleus, etc.

[0294] Fragments of AAV may be readily utilized in a variety of vector systems and host cells. Among desirable AAV fragments are the cap proteins, including the vp1, vp2, vp3 and hypervariable regions, the rep proteins, including rep 78, rep 68, rep 52, and rep 40, and the sequences encoding these proteins. Such fragments may be used alone, in combination with other AAV serotype sequences or fragments, or in combination with elements from other AAV or non-AAV viral sequences. As used herein, artificial AAV serotypes include, without limitation, AAV with a non-naturally occurring capsid protein. Such an artificial capsid may be generated by any suitable technique, using a novel AAV sequence of the invention (e.g., a fragment of a vp1 capsid protein) in combination with heterologous sequences which may be obtained from another AAV serotype (known or novel), non-contiguous portions of the same AAV serotype, from a non-AAV viral source, or from a non-viral source. An artificial AAV serotype may be, without limitation, a chimeric AAV capsid, a recombinant AAV capsid, or a “humanized” AAV capsid. In one embodiment, a vector contains AAV9 cap and/or rep sequences. See, U.S. Pat. No. 7,906,111, which is incorporated by reference herein.

[0295] In one embodiment, the AAV vector may comprise an AAV9 capsid. As used herein, an “AAV9 capsid” is characterized by DNAse-resistant particle which is an assembly of about 60 viral proteins (vp) which are typically expressed as alternative splice variants resulting in proteins of different length. See also Genbank Accession No. AAS99264.1, which is incorporated herein by reference. See, also U.S. Pat. No. 7,906,111 and WO 2005/033321. As used herein “AAV9 variants” include those described in, e.g., WO2016/049230, U.S. Pat. No. 8,927,514, US 2015/0344911, and U.S. Pat. No. 8,734,809, or a sequence sharing at least about 90%, 95%, 95%, 98% or 99% identity therewith.

[0296] An exemplary AAV9 capsid may comprise the amino acid sequence of SEQ ID NO: 731 (AAV9 VP1), SEQ ID NO: 732 (AAV9 VP2), or SEQ ID NO: 733 (AAV9 VP3) or an amino acid sequence having at least 95%, 96%, 97%, 98%, or 99% identity thereto. In some instances, the AAV vector may comprise one or more of an AAV9 VP1 capsid, an AAV9 VP2 capsid, and an AAV9 VP3 capsid.

[0297] In one embodiment, the AAV vector may comprise an AAV2 capsid.

[0298] An exemplary AAV2 capsid may comprise the amino acid sequence of SEQ ID NO: 831 (AAV2 VP1), SEQ ID NO: 832 (AAV2 VP2), or SEQ ID NO: 833 (AAV2 VP3) or an amino acid sequence having at least 95%, 96%, 97%, 98%, or 99% identity thereto. In some instances, the AAV vector may comprise one or more of an AAV2 VP1 capsid, an AAV2 VP2 capsid, and an AAV2 VP3 capsid.

[0299] In one embodiment, the AAV vector may comprise an AAVrh.10 capsid.

[0300] An exemplary AAVrh.10 capsid may comprise the amino acid sequence of SEQ ID NO: 931 (AAVrh.10 VP1), SEQ ID NO: 932 (AAVrh.10 VP2), or SEQ ID NO: 933 (AAVrh.10 VP3) or an amino acid sequence having at least 95%, 96%, 97%, 98%, or 99% identity thereto. In some instances, the AAV vector may comprise one or more of an AAVrh.10 VP1 capsid, an AAVrh.10 VP2 capsid, and an AAVrh.10 VP3 capsid.

[0301] As used herein, the term “clade” as it relates to groups of AAV refers to a group of AAV which are phylogenetically related to one another as determined using a Neighbor-Joining algorithm by a bootstrap value of at least 75% (of at least 1000 replicates) and a Poisson correction distance measurement of no more than 0.05, based on alignment of the AAV vp1 amino acid sequence. The Neighbor-Joining algorithm has been described in the literature. See, e.g., M. Nei and S. Kumar, Molecular Evolution and Phylogenetics, Oxford University Press, New York (2000). Computer programs are available that can be used to implement this algorithm. For example, the MEGA v2.1 program implements the modified Nei-Gojobori method. Using these techniques and computer programs, and the sequence of an AAV vp1 capsid protein, one of skill in the art can readily determine whether a selected AAV is contained in one of the clades identified herein, in another clade, or is outside these clades. See, e.g., G Gao, et al, J Virol, 2004 June; 78(10): 6381-6388, which identifies Clades A, B, C, D, E and F, and provides nucleic acid sequences of novel AAV, GenBank Accession Numbers AY530553 to AY530629. See, also, WO 2005/033321. AAV9 is further characterized by being within Clade F. Other Clade F AAV include AAVhu31 and AAVhu32.

[0302] As used herein, relating to AAV, the term variant means any AAV sequence which is derived from a known AAV sequence, including those sharing at least 70%, at least 75%, at least 80%, at least 85%, at least 90%, at least 95%, at least 97%, at least 99% or greater sequence identity over the amino acid or nucleic acid sequence. In another embodiment, the AAV capsid includes variants which may include up to about 10% variation from any described or known AAV capsid sequence. That is, the AAV capsid shares about 90% identity to about 99.9% identity, about 95% to about 99% identity or about 97% to about 98% identity to an AAV capsid provided herein and/or known in the art. In one embodiment, the AAV capsid shares at least 95% identity with an AAV9 capsid. When determining the percent identity of an AAV capsid, the comparison may be made over any of the variable proteins (e.g., vp1, vp2, or vp3). In one embodiment, the AAV capsid shares at least 95% identity with the AAV9 over the vp1, vp2 or vp3.

[0303] As used herein, “artificial AAV” means, without limitation, an AAV with a non-naturally occurring capsid protein. Such an artificial capsid may be generated by any suitable technique, using a selected AAV sequence (e.g., a fragment of a vp1 capsid protein) in combination with heterologous sequences which may be obtained from a different selected AAV, non-contiguous portions of the same AAV, from a non-AAV viral source, or from a non-viral source. An artificial AAV may be, without limitation, a pseudotyped AAV, a chimeric AAV capsid, a recombinant AAV capsid, or a “humanized” AAV capsid. Pseudotyped vectors, wherein the capsid of one AAV is replaced with a heterologous capsid protein, are useful in the invention. In one embodiment, AAV2/9 and AAV2/rh.10 are exemplary pseudotyped vectors.

[0304] In another embodiment, a self-complementary AAV is used. “Self-complementary AAV” refers a plasmid or vector having an expression cassette in which a coding region carried by a recombinant AAV nucleic acid sequence has been designed to form an intra-molecular double-stranded DNA template. Upon infection, rather than waiting for cell mediated synthesis of the second strand, the two complementary halves of scAAV will associate to form one double stranded DNA (dsDNA) unit that is ready for immediate replication and transcription. See, e.g., D M McCarty et al, “Self-complementary recombinant adeno-associated virus (scAAV) vectors promote efficient transduction independently of DNA synthesis”, Gene Therapy, (August 2001), Vol 8, Number 16, Pages 1248-1254. Self-complementary AAVs are described in, e.g., U.S. Pat. Nos. 6,596,535; 7,125,717; and 7,456,683, each of which is incorporated herein by reference in its entirety.

[0305] In still another embodiment, the expression cassette, including any of those described herein is employed to generate a recombinant AAV genome.

[0306] In one embodiment, the expression cassette described herein is engineered into a suitable genetic element (vector) useful for generating viral vectors and/or for delivery to a host cell, e.g., naked DNA, phage, transposon, cosmid, episome, etc., which transfers the human ABCD1 sequences carried thereon. The selected vector may be delivered by any suitable method, including transfection, electroporation, liposome delivery, membrane fusion techniques, high velocity DNA-coated pellets, viral infection and protoplast fusion. The methods used to make such constructs are known to those with skill in nucleic acid manipulation and include genetic engineering, recombinant engineering, and synthetic techniques. See, e.g., Sambrook et al, Molecular Cloning: A Laboratory Manual, Cold Spring Harbor Press, Cold Spring Harbor, NY.

[0307] For packaging an expression cassette or rAAV genome or production plasmid into virions, the ITRs are the only AAV components required in cis in the same construct as the expression cassette. In one embodiment, the coding sequences for the replication (rep) and/or capsid (cap) are removed from the AAV genome and supplied in trans or by a packaging cell line in order to generate the AAV vector.

[0308] Methods for generating and isolating AAV viral vectors suitable for delivery to a subject are known in the art. See, e.g., U.S. Pat. Nos. 7,790,449; 7,282,199; WO 2003/042397; WO 2005/033321, WO 2006/110689; and U.S. Pat. No. 7,588,772 B2. In a one system, a producer cell line is transiently transfected with a construct that encodes the transgene flanked by ITRs and a plasmid that encodes rep and cap. In a second system, a packaging cell line that stably supplies rep and cap is transiently transfected with a construct encoding the transgene flanked by ITRs. In each of these systems, AAV virions are produced in response to infection with helper adenovirus or herpesvirus, requiring the separation of the rAAVs from contaminating virus.

[0309] In one exemplary method for generating the AAV viral vector according to the present disclosure may comprise the following steps: (i) transfecting cells such as HEK293 cells with (1) a rAAV Genome Vector plasmid of interest (such as pSBT101, pOB1005, pOB1010, pOB1011, pOB1012, pOB1013, pOB1015, or pOB1017, or the plasmid encoding the AAV genome of AAV.ABCD1.WPRE-Xinact), (2) a plasmid encoding the AAV Rep and Cap protein (“Rep/Cap plasmid”) (such as pAAV2/9) and (3) a plasmid that encodes one or more viral helper gene (“Virus helper plasmid”) (such as pALD-X80 or pHELP_KanV4); (ii) performing purification such as column purification or CsCl gradient centrifugation on the supernatant or cell lysate; and (iii) desalting and concentrating the centrifugation product.

[0310] Alternatively, systems have been developed that do not require infection with helper virus to recover the AAV—the required helper functions (i.e., adenovirus E1, E2a, VA, and E4 or herpesvirus UL5, UL8, UL52, and UL29, and herpesvirus polymerase) are also supplied, in trans, by the system. In these newer systems, the helper functions can be supplied by transient transfection of the cells with constructs that encode the required helper functions, or the cells can be engineered to stably contain genes encoding the helper functions, the expression of which can be controlled at the transcriptional or posttranscriptional level.

[0311] In yet another system, the expression cassette flanked by ITRs and rep/cap genes are introduced into insect cells by infection with baculovirus-based vectors. For reviews on these production systems, see generally, e.g., Zhang et al, 2009, “Adenovirus-adeno-associated virus hybrid for large-scale recombinant adeno-associated virus production,” Human Gene Therapy 20:922-929, the contents of which is incorporated herein by reference in its entirety. Methods of making and using these and other AAV production systems are also described in the following U.S. patents, the contents of each of which is incorporated herein by reference in its entirety: U.S. Pat. Nos. 5,139,941; 5,741,683; 6,057,152; 6,204,059; 6,268,213; 6,491,907; 6,660,514; 6,951,753; 7,094,604; 7,172,893; 7,201,898; 7,229,823; and 7,439,065. See generally, e.g., Grieger & Samulski, 2005, “Adeno-associated virus as a gene therapy vector: Vector development, production and clinical applications,” Adv. Biochem. Engin/Biotechnol. 99: 119-145; Buning et al, 2008, “Recent developments in adeno-associated virus vector technology,” J. Gene Med. 10:717-733; and the references cited below, each of which is incorporated herein by reference in its entirety.

[0312] The methods used to construct any embodiment of this invention are known to those with skill in nucleic acid manipulation and include genetic engineering, recombinant engineering, and synthetic techniques. See, e.g., Green and Sambrook et al, Molecular Cloning: A Laboratory Manual, Cold Spring Harbor Press, Cold Spring Harbor, NY (2012). Similarly, methods of generating rAAV virions are well known and the selection of a suitable method is not a limitation on the present invention. See, e.g., K. Fisher et al, (1993) J. Virol., 70:520-532 and U.S. Pat. No. 5,478,745.

[0313] “Plasmids” generally are designated herein by a lower case p preceded and/or followed by capital letters and/or numbers, in accordance with standard naming conventions that are familiar to those of skill in the art. Many plasmids and other cloning and expression vectors that can be used in accordance with the present invention are well known and readily available to those of skill in the art. Moreover, those of skill readily may construct any number of other plasmids suitable for use in the invention. The properties, construction and use of such plasmids, as well as other vectors, in the present invention will be readily apparent to those of skill from the present disclosure.

[0314] In one embodiment, the production plasmid is that described herein, or as described in WO2012/158757, which is incorporated herein by reference. Various plasmids are known in the art for use in producing rAAV vectors and are useful herein. The production plasmids are cultured in the host cells which express the AAV cap and/or rep proteins. In the host cells, each rAAV genome is rescued and packaged into the capsid protein or envelope protein to form an infectious viral particle.

[0315] In one aspect, a production plasmid comprising an expression cassette described above is provided. In one embodiment, the production plasmid is one shown in FIGS. 5, 6, 7, 10-12. These plasmids are exemplified in the examples. Such plasmids contain a 5′ AAV ITR sequence; a selected promoter; a polyA signal; and a 3′ ITR; additionally, it also contains an intron sequence, such as the chicken beta-actin intron. An exemplary schematic thereof and associated SEQ ID NOs are shown in FIGS. 5, 6, 7, and 10-12. In some embodiments, the selected intron sequence keeps the rAAV vector genome with a size between about 3 kilobases (kb) to about 6 kb, about 4.7 kb to about 5 kb, about 3 kb to about 5.5 kb, or about 4.7 kb to 5.5 kb. An example of a production plasmid which includes the human ABCD1 encoding sequence can be found in SEQ ID NO: 100 or any of SEQ ID NOS: 10000, 10100, 10200, 10500, 11000, 11100, 11200, 11300, 11500, and 11700. In another embodiment, the production plasmid is modified to optimized vector plasmid production efficiency. Such modifications include addition of other neutral sequences, or inclusion of a lambda stuffer sequence to modulate the level of supercoil of the vector plasmid. Such modifications are contemplated herein. In other embodiments, terminator and other sequences are included in the plasmid.

[0316] In certain embodiments, the rAAV expression cassette, the vector (such as rAAV vector), the virus (such as rAAV), and/or the production plasmid comprises AAV inverted terminal repeat sequences, a codon optimized nucleic acid sequence that encodes human ABCD1, and expression control sequences that direct expression of the encoded proteins in a host cell. In other embodiments, the rAAV expression cassette, the virus, the vector (such as rAAV vector), and/or the production plasmid further comprise one or more of an intron, a Kozak sequence, a polyA, post-transcriptional regulatory elements and others. In one embodiment, the post-transcriptional regulatory element is a modified Woodchuck Hepatitis Virus (WHP) Posttranscriptional Regulatory Element (WPRE) wherein the X protein is not expressed or is expressed in an inactive form.

[0317] The expression cassettes, vectors and plasmids include other components that can be optimized for a specific species using techniques known in the art including, e.g., codon optimization, as described herein. The components of the cassettes, vectors, plasmids and viruses or other compositions described herein include a promoter sequence as part of the expression control sequences. In another embodiment, the promoter is cell-specific. The term “cell-specific” means that the particular promoter selected for the recombinant vector can direct expression of the human ABCD1 coding sequence in a particular cell or tissue type such as neurons or glial cells. In one embodiment, the promoter is specific for expression of the transgene in ependyma, the epithelial lining of the brain ventricular system. In another embodiment, the promoter is specific for expression in a brain cell selected from neurons, astrocytes, oligodendrocytes, dorsal root ganglia, and microglia. In one embodiment, the promoter is modified to add one or more restriction sites to facilitate cloning.

[0318] In another embodiment, the promoter is a ubiquitous or constitutive promoter. An example of a suitable promoter is a hybrid promoter, which in some instances comprises a chicken beta actin promoter along with a cytomegalovirus (CMV) enhancer element(s), such as the CMV enhancer sequence. Such a hybrid promoter is for example comprised in the constructs disclosed in FIGS. 5, 6, 7, and 10-12. In another embodiment, the promoter is the CB7 promoter. Other suitable promoters include the human b-actin promoter, the human elongation factor-1a promoter, the cytomegalovirus (CMV) promoter, the simian virus 40 promoter, and the herpes simplex virus thymidine kinase promoter. See, e.g., Damdindorj et al, (August 2014) “A Comparative Analysis of Constitutive Promoters Located in Adeno-Associated Viral Vectors”, PLOS ONE 9(8): e106472. Still other suitable promoters include viral promoters, constitutive promoters, regulatable promoters [see, e.g., WO 2011/126808 and WO 2013/04943] Alternatively a promoter responsive to physiologic cues may be utilized in the expression cassette, rAAV genomes, vectors, plasmids and viruses described herein. In one embodiment, the promoter is of a small size, under 1000 bp, due to the size limitations of the AAV vector. In another embodiment, the promoter is under 400 bp. Other promoters may be selected by one of skill in the art.

[0319] In a further embodiment, the promoter is selected from SV40 promoter, the dihydrofolate reductase promoter, a phage lambda (PL) promoter, a herpes simplex viral (HSV) promoter, a tetracycline-controlled trans-activator-responsive promoter (tet) system, a long terminal repeat (LTR) promoter, such as a RSV LTR, MoMLV LTR, BIV LTR or an HIV LTR, a U3 region promoter of Moloney murine sarcoma virus, a Granzyme A promoter, a regulatory sequence(s) of the metallothionein gene, a CD34 promoter, a CD8 promoter, a thymidine kinase (TK) promoter, a B 19 parvovirus promoter, a PGK promoter, a glucocorticoid promoter, a heat shock protein (HSP) promoter, such as HSP65 and HSP70 promoters, an immunoglobulin promoter, an MMTV promoter, a Rous sarcoma virus (RSV) promoter, a lac promoter, a CaMV 35 S promoter, a nopaline synthetase promoter, an MND promoter, or an MNC promoter. The promoter sequences thereof are known to one of skill in the art or publicly available, such as in the literature or in databases, e.g., GenBank, PubMed, or the like.

[0320] In another embodiment, the promoter is an inducible promoter. The inducible promoter may be selected from known promoters including the rapamycin/rapalog promoter, the ecdysone promoter, the estrogen-responsive promoter, and the tetracycline-responsive promoter, or heterodimeric repressor switch. See, Sochor et al, “An Autogenously Regulated Expression System for Gene Therapeutic Ocular Applications”, Scientific Reports, 2015 Nov. 24; 5: 17105 and Daber R, Lewis M., “A novel molecular switch”, J Mol Biol. 2009 Aug. 28; 391(4):661-70, Epub 2009 Jun. 21 which are both incorporated herein by reference in their entirety.

[0321] In other embodiments, the expression cassette, vector, plasmid and virus described herein contain other appropriate transcription initiation, termination, enhancer sequences, efficient RNA processing signals such as splicing and polyadenylation (poly A) signals; TATA sequences; sequences that stabilize cytoplasmic mRNA; sequences that enhance translation efficiency (i.e., Kozak consensus sequence); introns; sequences that enhance protein stability; and when desired, sequences that enhance secretion of the encoded product. The expression cassette or vector may contain none, one or more of any of the elements described herein.

[0322] In some embodiments, the rAAV viral genome and plasmids encoding an rAAV viral genome as disclosed herein may comprise one terminator, which facilitate termination of translation of the encoded ABCD1 gene or an ABCD1 gene variant. In some instances, such a terminator may be referred to herein as “Terminator 1”. In some embodiments, the rAAV viral genome and plasmids encoding an rAAV viral genome as disclosed herein may comprise another terminator, which also facilitate termination of translation of the encoded ABCD1 gene or an ABCD1 gene variant. In some instances, such a terminator may be referred to herein as “Terminator 2” and may be same as or different from “Terminator 1”. In some embodiments, the rAAV viral genome and plasmids encoding an rAAV viral genome as disclosed herein may comprise more than two terminators. In some embodiments, Terminator 1 may be encoded by the nucleic acid sequence of SEQ ID NO: 10071, 10171, 10271, 10571, 11071, 11171, 11271, 11371, 11571, or 11771. In some embodiments, Terminator 2 may be encoded by the nucleic acid sequence of SEQ ID NO: 10572, 11272, or 11372.

[0323] Examples of suitable polyA (also referred to herein as “pA”) signals include, e.g., a synthetic polyA or from bovine growth hormone (bGH), human growth hormone (hGH), SV40, rabbit b-globin (RGB), or modified RGB (mRGB). An exemplary bGH pA sequence may comprise the sequence provided by, e.g., Accession No. M57764. An exemplary hGH pA sequence may comprise the sequence provided by, e.g., Accession No. NG_011676. An exemplary SV40 pA sequence may comprise the sequence provided by, e.g., Accession No. NC_001669. An exemplary RBG pA sequence may comprise the sequence provided by, e.g., Accession No. V00882. In an exemplary embodiment, the poly A is an SV40 or BGH polyA sequence comprising a nucleic acid sequence as shown in the AAV constructs described herein, such as those disclosed in FIGS. 5, 6, 7, and 10-12. In some embodiments, the SV40 poly A signal may comprise the nucleic acid sequence of SEQ ID NO: 27, 10014, 10114, 10214, 10514, 11014, 11214, or 11714. In some embodiments, the bGH poly A signal may comprise the nucleic acid sequence of SEQ ID NO: 10016, 10116, 10216, 11016, 11116, 11216, 11316, 11516, or 11714. In some embodiments, both SV40 poly A and bGH poly A signals may be used in tandem. In such cases, the poly A signal may comprise the nucleic acid sequence of SEQ ID NO: 306, 405, 10035, 10135, 10235, 11035, 11235, or 11735.

[0324] Examples of suitable enhancers include, e.g., the CMV enhancer, the RSV enhancer, the alpha fetoprotein enhancer, the TTR minimal promoter/enhancer, LSP (TH-binding globulin promoter/alpha 1-microglobulin/bikunin enhancer), an APB enhancer, ABPS enhancer, an alpha mic/bik enhancer, TTR enhancer, en34, ApoE amongst others. In some embodiments, the CMV enhancer may comprise a reference CMV sequence provided by Accession No: NC_006273. In some embodiments, the CMV enhancer may comprise the nucleic acid sequence of SEQ ID NO: 7, 10005, 10105, 10205, 10505, 11005, 11105, 11205, 11305, 11505, or 11705.

[0325] In one embodiment, a Kozak sequence, such as ‘CCACC’ or a sequence representing an approach to the consensus sequence for optimal protein translation initiation: GCCRCCATGG, is included upstream of the human ABCD1 coding sequence to enhance translation from the correct initiation codon. In another embodiment, CBA exon 1 and intron are included in the expression cassette. In one embodiment, the human ABCD1 coding sequence is placed under the control of a hybrid promoter. In some instances, a hybrid promoter comprises a cytomegalovirus (CMV) immediate early enhancer, the proximal chicken beta actin promoter, and CBA exon 1 flanked by intron 1 sequences.

[0326] In another embodiment, the intron is selected from CBA, human beta globin, IVS2, SV40, bGH, alpha-globulin, beta-globulin, collagen, ovalbumin, p53, rabbit beta globin or a fragment thereof. An exemplary CBA intron may comprise a sequence provided by, e.g., Accession No. X00182. An exemplary rabbit beta globin intron may comprise a sequence provided by, e.g., Accession No. V00882. An exemplary intron may comprise the nucleic acid sequence of SEQ ID NOS: 12, 10009, 10109, 10209, 10509, 11009, 11109, 11209, 11309, 11509, or 11709.

[0327] In one embodiment, the expression cassette, the vector, the plasmid and the virus contain chicken beta-actin promoter, CMV enhancer, chicken beta-actin exon 1 and intron, human ABCD1 sequence, and SV40 and/or BGH poly A. In a further embodiment, the expression cassette includes nt 1 to 3713 of SEQ ID NO: 100.

[0328] In a further embodiment, the production plasmid has a sequence of SEQ ID NO: 100 or any of SEQ ID NOS: 10000, 10100, 10200, 10500, 11000, 11100, 11200, 11300, 11500, or 11700, or any variant thereof which is functionally equivalent.

[0329] In some preferred embodiments, the production plasmid has a sequence of SEQ ID NO:10000, 10100, 10200, 10500, 11000, 11100, 11200, 11300, 11500, or 11700.

[0330] In further preferred embodiments, the production plasmid has a sequence of SEQ ID NO: 10100, 11000, 11500, or 11700.

[0331] In another aspect, a method for treating ALD or AMN disease caused by a defect in the ABCD1 gene comprises delivering to a subject in need thereof a vector (such as rAAV) which encodes human ABCD1, as described herein. In one embodiment, a method of treating a subject having ALD or AMN disease with a rAAV described herein is provided.

[0332] Also provided herein are pharmaceutical compositions. The pharmaceutical compositions described herein are designed for delivery to subjects in need thereof by any suitable route or a combination of different routes.

[0333] In yet other aspects, these nucleic acid sequences, vectors, expression cassettes and rAAV viral vectors are useful in a pharmaceutical composition, which also comprises a pharmaceutically acceptable carrier, excipient, buffer, diluent, surfactant, preservative and/or adjuvant, etc. Such pharmaceutical compositions are used to stabilize the rAAV virus, prevent loss of rAAV virus during delivery, and/or help successfully express the human ABCD1 protein in the host cells through delivery by such recombinantly engineered AAVs or artificial AAVs.

[0334] To prepare these pharmaceutical compositions containing the nucleic acid sequences, vectors, expression cassettes and rAAV viral vectors, the sequences or vectors or viral vector is preferably assessed for contamination by conventional methods and then formulated into a pharmaceutical composition suitable for administration to the patient. Such formulation involves the use of a pharmaceutically and/or physiologically acceptable vehicle or carrier, such as buffered saline or other buffers, e.g., HEPES, to maintain pH at appropriate physiological levels, and, optionally, other medicinal agents, pharmaceutical agents, stabilizing agents, buffers, carriers, adjuvants, diluents, surfactant, or excipient etc. For injection, the carrier will typically be a liquid. Exemplary physiologically acceptable carriers include sterile, pyrogen-free water and sterile, pyrogen-free, phosphate buffered saline. A variety of such known carriers are provided in U.S. Pat. No. 7,629,322, incorporated herein by reference. In one embodiment, the carrier is an isotonic sodium chloride solution. In another embodiment, the carrier is balanced salt solution. In one embodiment, the carrier includes tween. If the virus is to be stored long term, it may be frozen in the presence of glycerol or Tween20.

[0335] In one exemplary specific embodiment, the composition of the carrier or excipient may contain 180 mM NaCl, 10 mM NaPi, pH 7.3 with 0.0001%-0.01% Pluronic F68 (PF68). The exact composition of the saline component of the buffer may range from 160 mM to 180 mM NaCl. Optionally, a different pH buffer (potentially HEPES, sodium bicarbonate, TRIS) may be used in place of the buffer specifically described. Still alternatively, a buffer containing 0.9% NaCl may be used.

[0336] As used herein, the term “dosage” can refer to the total dosage delivered to the subject in the course of treatment, or the amount delivered in a single unit (or multiple unit or split dosage) administration. The pharmaceutical virus compositions can be formulated in dosage units to contain an amount of replication-defective virus carrying the codon optimized nucleic acid sequences encoding human ABCD1 as described herein that is in the range of about 1.0×10⁹ GC to about 1.0×10¹⁶ GC per dose including all integers or fractional amounts within the range. In one embodiment, the compositions are formulated to contain at least 1×10⁹, 2×10⁹, 3×10⁹, 4×10⁹, 5×10⁹, 6×10⁹, 7×10⁹, 8×10⁹, or 9×10⁹ GC per dose including all integers or fractional amounts within the range. In another embodiment, the compositions are formulated to contain at least 1×10¹⁰, 2×10¹⁰, 3×10¹⁰, 4×10¹⁰, 5×10¹⁰, 6×10¹⁰, 7×10¹⁰, 8×10¹⁰, or 9×10¹⁰ GC per dose including all integers or fractional amounts within the range. In another embodiment, the compositions are formulated to contain at least 1×10¹¹, 2×10^{v}, 3×10¹¹, 4×10¹¹, 5×10¹¹, 6×10¹¹, 7×10¹¹, 8×10¹¹, or 9×10¹¹ GC per dose including all integers or fractional amounts within the range. In another embodiment, the compositions are formulated to contain at least 1×10¹², 2×10¹², 3×10¹², 4×10¹², 5×10¹², 6×10¹², 7×10¹², 8×10¹², or 9×10¹² GC per dose including all integers or fractional amounts within the range. In another embodiment, the compositions are formulated to contain at least 1×10¹³, 2×10¹³, 3×10¹³, 4×10¹³, 5×10¹³, 6×10¹³, 7×10¹³, 8×10¹³, or 9×10¹³ GC per dose including all integers or fractional amounts within the range. In another embodiment, the compositions are formulated to contain at least 1×10¹⁴, 2×10¹⁴, 3×10¹⁴, 4×10¹⁴, 5×10¹⁴, 6×10¹⁴, 7×10¹⁴, 8×10¹⁴, or 9×10¹⁴ GC per dose including all integers or fractional amounts within the range. In another embodiment, the compositions are formulated to contain at least 1×10¹⁵, 2×10¹⁵, 3×10¹⁵, 4×10¹⁵, 5×10¹⁵, 6×10¹⁵, 7×10¹⁵, 8×10¹⁵, or 9×10¹⁵ GC per dose including all integers or fractional amounts within the range. In one embodiment, for human application the dose can range from 1×10¹⁰ to about 1×10¹² GC per dose including all integers or fractional amounts within the range. All dosages may be measured by any known method, including as measured by qPCR or digital droplet PCR (ddPCR) as described in, e.g., M. Lock et al, Hum Gene Ther Methods. 2014 April; 25(2): 115-25. doi: 10. 1089/hgtb.2013.131, which is incorporated herein by reference.

[0337] In one embodiment, an aqueous suspension suitable for administration to an ALD or AMN patient is provided. The suspension comprises an aqueous suspending liquid and about 7.5×10⁹ GC or viral particles to about 1×10¹² GC or viral particles per gram of brain of a recombinant adeno-associated virus (rAAV) described herein useful as a therapeutic for ALD or AMN disease.

[0338] It may also be desirable to administer multiple “booster” dosages of the pharmaceutical compositions of this invention. For example, depending upon the duration of the transgene within the CNS, one may deliver booster dosages at 6-month intervals, or yearly following the first administration. The fact that AAV-neutralizing antibodies were not generated by administration of the rAAV vector should allow additional booster administrations.

[0339] Such booster dosages and the need therefor can be monitored by the attending physicians, using, for example, the human ABCD1 activity, and/or neurologic tests. Other similar tests may be used to determine the status of the treated subject over time. Selection of the appropriate tests may be made by the attending physician. Still alternatively, the method of this invention may also involve injection of a larger volume of virus-containing solution in a single or multiple infection to allow ABCD1 activity levels close to those found in normal subjects.

[0340] These above doses may be administered in a variety of volumes of carrier, excipient or buffer formulation, ranging from about 100 microliters to about 150 mL, including all numbers within the range, depending on the size of the patient, the viral titer used, the route of administration, and the desired effect of the method. In one embodiment, the volume of carrier, excipient or buffer is at least about 500 μL. In one embodiment, the volume is about 750 μL. In another embodiment, the volume is about 1 mL. In another embodiment, the volume is about 2 mL. In another embodiment, the volume is about 3 mL. In another embodiment, the volume is about 4 mL. In another embodiment, the volume is about 5 mL. In another embodiment, the volume is about 6 mL. In another embodiment, the volume is about 7 mL. In another embodiment, the volume is about 8 mL. In another embodiment, the volume is about 9 mL. In another embodiment, the volume is about 10 mL. In another embodiment, the volume is about 11 mL. In another embodiment, the volume is about 12 mL. In another embodiment, the volume is about 13 mL. In another embodiment, the volume is about 14 mL. In another embodiment, the volume is about 15 mL. In another embodiment, the volume is about 16 mL. In another embodiment, the volume is about 17 mL. In another embodiment, the volume is about 18 mL. In another embodiment, the volume is about 19 mL. In another embodiment, the volume is about 20 mL. In another embodiment, the volume is about 21 mL. In another embodiment, the volume is about 22 mL. In another embodiment, the volume is about 23 mL. In another embodiment, the volume is about 24 mL. In another embodiment, the volume is about 25 mL or more. In one embodiment, the maximum injected volume is about 10% of total cerebrospinal fluid volume. In another embodiment, the volume is between about 50 mL and about 150 mL. In another embodiment, the volume is about 50 mL. In another embodiment, the volume is about 60 mL. In another embodiment, the volume is about 70 mL. In another embodiment, the volume is about 80 mL. In another embodiment, the volume is about 90 mL. In another embodiment, the volume is about 100 mL. In another embodiment, the volume is about 110 mL. In another embodiment, the volume is about 120 mL. In another embodiment, the volume is about 130 mL. In another embodiment, the volume is about 140 mL. In another embodiment, the volume is about 150 mL. In a preferred embodiment, the volume is about 100 mL.

[0341] In one embodiment, the viral constructs may be delivered in doses of from at least 1×10⁹ to about least 1×10¹³ GCs in volumes of about 100 microliters to about 1 mL for small animal subjects, such as mice. For larger veterinary subjects, the larger human dosages and volumes stated above are useful. See, e.g., Diehl et al, J. Applied Toxicology, 21: 15-23 (2001) for a discussion of good practices for administration of substances to various veterinary animals. This document is incorporated herein by reference.

[0342] It is desirable that the lowest effective concentration of virus or other delivery vehicle be utilized in order to reduce the risk of undesirable effects, such as toxicity. Still other dosages in these ranges may be selected by the attending physician, considering the physical state of the subject, preferably human, being treated, the age of the subject, and the degree to which the disorder, has developed.

[0343] Yet another aspect described herein is a method of treating or preventing adrenoleukodystrophy (ALD) and/or adrenomyeloneuropathy (AMN) and/or ameliorating symptoms associated therewith in a mammalian subject. In one embodiment, an rAAV carrying the ABCD1 native, modified or codon optimized sequence, preferably suspended in a physiologically compatible carrier, diluent, excipient and/or adjuvant, may be administered to a desired subject including a human subject in a therapeutically effective amount. This method comprises administering to a subject in need thereof any of the nucleic acid sequences, expression cassettes, rAAV genomes, plasmids, vectors or rAAV vectors or compositions containing them.

[0344] In one embodiment, the composition is delivered intrathecally. In another embodiment, the composition is delivered via ICV. In another embodiment, the composition is delivered via intracisternal administration. In still another embodiment, the composition is delivered using a combination of administrative routes suitable for treatment of ALD or AMN disease and may also involve intravenous administration or other conventional administration routes.

[0345] For use in these methods, the volume and viral titer of each dosage is determined individually, as further described herein. The dosages, administrations and regimens may be determined by the attending physician given the teachings of this specification. In another embodiment, the method involves administering the compositions in two or more dosages (e.g., split dosages). In another embodiment, a second administration of an rAAV including the selected expression cassette (e.g., ABCD1 containing cassette) is performed at a later time point. Such time point may be weeks, months or years following the first administration. Such second administration is, in one embodiment, performed with an rAAV having a different capsid than the rAAV from the first administration. In another embodiment, the rAAV from the first and second administration have the same capsid.

[0346] In still other embodiments, the compositions described herein may be delivered in a single composition or multiple compositions. Optionally, two or more different AAV may be delivered, or multiple viruses (see, e.g., WO 2011/126808 and WO 2013/049493). In another embodiment, multiple viruses may contain different replication-defective viruses (e.g., AAV and adenovirus).

[0347] According to the present invention, a “therapeutically effective amount” of the human ABCD1 vector is delivered as described herein to achieve a desired result, i.e., treatment of ALD or AMN disease or one or more symptoms thereof. In one embodiment, the goal of treatment is to limit progression of the disease. This may be assessed by a quantitative and qualitative evaluation of symptoms, such as described previously.

[0348] In another embodiment, the method includes performing additional testing, e.g., assays and neurologic testing to determine the efficacy of the treatment. Such tests include those performed as part of the UBDRS, and include, without limitation, assessment of: speech clarity, tongue protrusion, visual acuity, tone (arms, legs, neck), strength (arms, legs), hand tapping, heel stomping, spontaneous movements (akinesia), Stereotypies, Dystonia, myoclonus, tremor, chorea, dysmetria, gait, postural stability, seizures, behavior and mood, and overall health.

[0349] In one embodiment of the methods described herein, a one-time delivery of a composition as described herein, e.g., an AAV delivery of an optimized human ABCD1 cassette, is useful in treating ALD or AMN disease in a subject. In another embodiment of the methods described herein, a one-time delivery of a composition as described herein, e.g., an AAV delivery of an optimized human ABCD1 cassette, is useful in preventing ALD or AMN disease in a subject having a defect in the ABDC1 gene.

[0350] Thus, in one embodiment, the composition is administered before disease onset. In another embodiment, the composition is administered prior to the initiation of neurological impairment. In another embodiment, the composition is administered after initiation of neurological impairment. In one embodiment, neonatal treatment is defined as being administered an ABCD1 coding sequence, expression cassette or vector as described herein within 8 hours, the first 12 hours, the first 24 hours, or the first 48 hours of delivery. In another embodiment, particularly for a primate (human or non-human), neonatal delivery is within the period of about 12 hours to about 1 week, 2 weeks, 3 weeks, or about 1 month, or after about 24 hours to about 48 hours. In another embodiment, the composition is delivered after onset of symptoms. In one embodiment, treatment of the patient (e.g., a first injection) is initiated prior to the first year of life. In another embodiment, treatment is initiated after the first 1 year, or after the first 2 to 3 years of age, after 5 years of age, after 11 years of age, or at an older age. In one embodiment, treatment is initiated from ages about 4 years of age to about 12 years of age. In one embodiment, treatment is initiated on or after about 4 years of age. In one embodiment, treatment is initiated on or after about 5 years of age. In one embodiment, treatment is initiated on or after about 6 years of age. In one embodiment, treatment is initiated on or after about 7 years of age. In one embodiment, treatment is initiated on or after about 8 years of age. In one embodiment, treatment is initiated on or after about 9 years of age. In one embodiment, treatment is initiated on or after about 10 years of age. In one embodiment, treatment is initiated on or after about 11 years of age. In one embodiment, treatment is initiated on or after about 12 years of age. However, treatment can be initiated on or after about 15, about 20, about 25, about 30, about 35, or about 40 years of age. In one embodiment, treatment in utero is defined as administering the composition as described herein in the fetus. See, e.g., David et al, Recombinant adeno-associated virus-mediated in utero gene transfer gives therapeutic transgene expression in the sheep, Hum Gene Ther. 2011 April; 22(4):419-26. doi: 10. 1089/hum.2010.007. Epub 2011 Feb. 2, which is incorporated herein by reference.

[0351] In another embodiment, the composition is re-administered at a later date. Optionally, more than one re-administration is permitted. Such re-administration may be with the same type of vector, a different viral vector, or via non-viral delivery as described herein.

[0352] The goals of the treatments described herein include limiting or halting the progression of ALD or AMN disease. Desirable results of the treatments include, without limitation, increases in any of the assessment scores of the UBDRS, an increase in ABCD1 activity or expression levels, reduction in the amount of VLCFA's or stabilization of or a slowing of the increase of VLCFA's in the subject, increase in (or reduction in progression of impairment of) motor function, as determined by neurologic testing, and increase in (or reduction in progression of impairment of) cortical volume by MRI. A desired result includes reducing muscle weakness, increasing muscle strength and tone, or maintaining or increasing respiratory health, or reducing tremors or twitching. Other desired endpoints can be determined by a physician.

[0353] In yet another embodiment, any of the above described methods is performed in combination with another, or secondary, therapy. The secondary therapy may be any now known, or as yet unknown, therapy which helps prevent, arrest or ameliorate these mutations or defects or any of the effects associated therewith. The secondary therapy can be administered before, concurrent with, or after administration of the compositions described above. In one embodiment, a method of generating a recombinant rAAV comprises obtaining a plasmid containing an AAV expression cassette as described above and culturing a packaging cell carrying the plasmid in the presence of sufficient viral sequences to permit packaging of the AAV viral genome into an infectious AAV envelope or capsid. Specific methods of rAAV vector generation are described above and may be employed in generating a rAAV vector that can deliver the ABCD1 gene in the expression cassettes and genomes described herein.

[0354] In certain embodiments of this invention, a subject has ALD or AMN disease, for which the components, compositions and methods of this invention are designed to treat. As used herein, the term “subject” as used herein means a mammalian animal, including a human, a veterinary or farm animal, a domestic animal or pet, and animals normally used for clinical research. In one embodiment, the subject of these methods and compositions is a human. Still other suitable subjects include, without limitation, murine, rat, canine, feline, porcine, bovine, ovine, non-human primate and others. As used herein, the term “subject” is used interchangeably with “patient”.

[0355] As used herein, the term “treatment” or “treating” is defined encompassing administering to a subject one or more compounds or compositions described herein for the purposes of amelioration of one or more symptoms of ALD or AMN disease. “Treatment” can thus include one or more of reducing onset or progression of ALD or AMN disease, preventing disease, reducing the severity of the disease symptoms, or retarding their progression, including the progression of neurological impairment, removing the disease symptoms, delaying onset of disease or monitoring progression of disease or efficacy of therapy in a given subject.

[0356] In one aspect, an AAV vector is provided which encodes a functional human ABCD1 protein. By “functional hABCD1”, is meant a gene which encodes an ABCD1 protein which provides at least about 50%, at least about 75%, at least about 80%, at least about 90%, or about the same, or greater than 100% of the biological activity level of the native ABCD1 protein, or a natural variant or polymorph thereof which is not associated with disease.

[0357] A variety of assays exist for measuring ABCD1 expression and activity levels in vitro. The methods described herein can also be combined with any other therapy for treatment of ALD or AMN disease or the symptoms thereof.

[0358] In certain embodiments, the AAV-ABCD1 viral vector is produced. A number of suitable purification methods may be selected. Examples of suitable purification methods are described, e.g., International Patent Application No. PCT/US2016/065970, filed Dec. 9, 2016 and its priority documents, US Patent Application Nos. 62/322,071, filed Apr. 13, 2016 and 62/226,357, filed Dec. 11, 2015 and entitled “Scalable Purification Method for AAV9”, which is incorporated by reference herein.

[0359] In the case of AAV viral vectors, quantification of the genome copies (“GC”) may be used as the measure of the dose contained in the formulation. Any method known in the art can be used to determine the genome copy (GC) number of the replication-defective virus compositions of the invention. One method for performing AAV GC number titration is as follows: Purified AAV vector samples are first treated with DNase to eliminate contaminating host DNA from the production process. The DNase resistant particles are then subjected to heat treatment to release the genome from the capsid. The released genomes are then quantitated by real-time PCR using primer/probe sets targeting specific region of the viral genome (for example poly A signal). Another suitable method for determining genome copies are the quantitative-PCR (qPCR), particularly the optimized qPCR or digital droplet PCR [Lock Martin, et al, Human Gene Therapy Methods. April 2014, 25(2): 115-125. doi: 10.1089/hgtb.2013.131, published online ahead of editing Dec. 13, 2013] Alternatively, ViroCyt3100 can be used for particle quantitation, or flow cytometry. In another method, the effective dose of a recombinant adeno-associated virus carrying a nucleic acid sequence encoding the ABCD1 coding sequence is measured as described in S. K. McLaughlin et al, 1988, J. Virol., 62: 1963, which is incorporated by reference in its entirety.

[0360] The replication-defective virus compositions can be formulated in dosage units to contain an amount of replication-defective virus that is in the range of about 1.0×10⁹ GC to about 9×10¹⁵ GC (to treat an average subject of 70 kg in body weight) including all integers or fractional amounts within the range, and preferably 1.0×10¹² GC to 1.0×10¹⁵ GC for a human patient. In one embodiment, the compositions are formulated to contain at least 1×10⁹, 2×10⁹, 3×10⁹, 4×10⁹, 5×10⁹, 6×10⁹, 7×10⁹, 8×10⁹, or 9×10⁹ GC per dose including all integers or fractional amounts within the range. In another embodiment, the compositions are formulated to contain at least 1×10¹⁰, 2×10¹⁰, 3×10¹⁰, 4×10¹⁰, 5×10¹⁰, 6×10¹⁰, 7×10¹⁰, 8×10¹⁰, or 9×10¹⁰ GC per dose including all integers or fractional amounts within the range. In another embodiment, the compositions are formulated to contain at least 1×10¹¹, 2×10¹¹, 3×10¹¹, 4×10¹¹, 5×10¹¹, 6×10¹¹, 7×10¹¹, 8×10¹¹, or 9×10¹¹ GC per dose including all integers or fractional amounts within the range. In another embodiment, the compositions are formulated to contain at least 1×10¹², 2×10¹², 3×10¹², 4×10¹², 5×10¹², 6×10¹², 7×10¹², 8×10¹², or 9×10¹² GC per dose including all integers or fractional amounts within the range. In another embodiment, the compositions are formulated to contain at least 1×10¹³, 2×10¹³, 3×10¹³, 4×10¹³, 5×10¹³, 6×10¹³, 7×10¹³, 8×10¹³, or 9×10¹³ GC per dose including all integers or fractional amounts within the range. In another embodiment, the compositions are formulated to contain at least 1×10¹⁴, 2×10¹⁴, 3×10¹⁴, 4×10¹⁴, 5×10¹⁴, 6×10¹⁴, 7×10¹⁴, 8×10¹⁴, or 9×10¹⁴ GC per dose including all integers or fractional amounts within the range. In another embodiment, the compositions are formulated to contain at least 1×10¹⁵, 2×10¹⁵, 3×10¹⁵, 4×10¹⁵, 5×10¹⁵, 6×10¹⁵, 7×10¹⁵, 8×10¹⁵, or 9×10¹⁵ GC per dose including all integers or fractional amounts within the range. In one embodiment, for human application the dose can range from 1×10¹⁰ to about 1×10¹⁵ GC per dose including all integers or fractional amounts within the range.

[0361] In one embodiment, the viral constructs may be delivered in doses of from at least about least 1×10⁹ GCs to about 1×10¹⁵ GC, or about 1×10¹¹ GC to 1×10¹⁵ GC. Suitable volumes for delivery of these doses and concentrations may be determined by one of skill in the art. For example, volumes of about 1 μL to 150 mL may be selected, with the higher volumes being selected for adults. Typically, for newborn infants a suitable volume is about 0.5 mL to about 10 mL, for older infants, about 0.5 mL to about 15 mL may be selected. For toddlers, a volume of about 0.5 mL to about 20 mL may be selected. For children, volumes of up to about 30 mL may be selected. For pre-teens and teens, volumes up to about 50 mL may be selected. In still other embodiments, a patient may receive an intrathecal administration in a volume of about 5 mL to about 15 mL are selected, or about 7.5 mL to about 10 mL. In other embodiments, a patient may receive intrathecal administration of between 10 and 150 mL, between 50 mL and 150 mL, between 75 mL and 125 mL, or about 100 mL. Other suitable volumes and dosages may be determined. The dosage will be adjusted to balance the therapeutic benefit against any side effects and such dosages may vary depending upon the therapeutic application for which the recombinant vector is employed.

[0362] The above-described recombinant vectors may be delivered to host cells according to published methods. In certain embodiments, for administration to a human patient, the rAAV is suitably suspended in an aqueous solution containing saline, a surfactant, and a physiologically compatible salt or mixture of salts. Suitably, the formulation is adjusted to a physiologically acceptable pH, e.g., in the range of pH 6 to 9, or pH 6.5 to 7.5, pH 7.0 to 7.7, or pH 7.2 to 7.8. As the pH of the cerebrospinal fluid is about 7.28 to about 7.32, for intrathecal delivery, a pH within this range may be desired; whereas for intravenous delivery, a pH of 6.8 to about 7.2 may be desired. However, other pHs within the broadest ranges and these subranges may be selected for other route of delivery.

[0363] A suitable surfactant, or combination of surfactants, may be selected from among nonionic surfactants that are nontoxic. In one embodiment, a difunctional block copolymer surfactant terminating in primary hydroxyl groups is selected, e.g., such as Pluronic® F68 (BASF), also known as Poloxamer 188, which has a neutral pH, has an average molecular weight of 8400. Other surfactants and other Poloxamers may be selected, i.e., nonionic triblock copolymers composed of a central hydrophobic chain of polyoxypropylene (polypropylene oxide) flanked by two hydrophilic chains of polyoxyethylene (polyethylene oxide), SOLUTOL HS 15 (Macrogol-15 Hydroxystearate), LABRASOL (Polyoxy capryllic glyceride), polyoxy 10 oleyl ether, TWEEN (polyoxyethylene sorbitan fatty acid esters), ethanol and polyethylene glycol. In one embodiment, the formulation contains a poloxamer. These copolymers are commonly named with the letter “P” (for poloxamer) followed by three digits: the first two digits×100 give the approximate molecular mass of the polyoxypropylene core, and the last digit×10 gives the percentage polyoxyethylene content. In one embodiment Poloxamer 188 is selected.

[0364] The surfactant may be present in an amount up to about 0.0005% to about 0.001% of the suspension.

[0365] In one example, the formulation may contain, e.g., buffered saline solution comprising one or more of sodium chloride, sodium bicarbonate, dextrose, magnesium sulfate (e.g., magnesium sulfate-7H₂O), potassium chloride, calcium chloride (e.g., calcium chloride-2H₂O), dibasic sodium phosphate, and mixtures thereof, in water. Suitably, for intrathecal delivery, the osmolarity is within a range compatible with cerebrospinal fluid (e.g., about 275 to about 290 Osm/L). Optionally, for intrathecal delivery, a commercially available diluent may be used as a suspending agent, or in combination with another suspending agent and other optional excipients. See, e.g., Elliotts B® solution (Lukare Medical). In other embodiments, the formulation may contain one or more permeation enhancers. Examples of suitable permeation enhancers may include, e.g., mannitol, sodium glycocholate, sodium taurocholate, sodium deoxycholate, sodium salicylate, sodium caprylate, sodium caprate, sodium lauryl sulfate, polyoxyethylene-9-laurel ether, or EDTA.

[0366] In another embodiment, the composition includes a carrier, diluent, excipient and/or adjuvant. Suitable carriers may be readily selected by one of skill in the art in view of the indication for which the transfer virus is directed. For example, one suitable carrier includes saline, which may be formulated with a variety of buffering solutions (e.g., phosphate buffered saline). Other exemplary carriers include sterile saline, lactose, sucrose, calcium phosphate, gelatin, dextran, agar, pectin, peanut oil, sesame oil, and water. The buffer/carrier should include a component that prevents the rAAV, from sticking to the infusion tubing but does not interfere with the rAAV binding activity in vivo.

[0367] Optionally, the compositions of the invention may contain, in addition to the rAAV and carrier(s), other conventional pharmaceutical ingredients, such as preservatives, or chemical stabilizers. Suitable exemplary preservatives include chlorobutanol, potassium sorbate, sorbic acid, sulfur dioxide, propyl gallate, the parabens, ethyl vanillin, glycerin, phenol, and parachlorophenol. Suitable chemical stabilizers include gelatin and albumin.

[0368] The compositions according to the present invention may comprise a pharmaceutically acceptable carrier, such as defined above. Suitably, the compositions described herein comprise an effective amount of one or more AAV suspended in a pharmaceutically suitable carrier and/or admixed with suitable excipients designed for delivery to the subject via injection, pump, intrathecal catheter, or for delivery by another device or route. In one example, the composition is formulated for intrathecal delivery. In one embodiment, intrathecal delivery encompasses an injection into the spinal canal, e.g., the subarachnoid space. In one embodiment, the route of delivery is intracerebroventricular injection (ICV). In another embodiment, the route of delivery is intrathecal-lumbar (IT-L) delivery. In another embodiment, the route of delivery is intracisternal administration.

[0369] The viral vectors described herein may be used in preparing a medicament for delivering ABCD1 protein to a subject (e.g., a human patient) in need thereof, supplying functional ABCD1 to a subject, and/or for treating ALD or AMN disease. A course of treatment may optionally involve repeat administration of the same viral vector (e.g., an AAV2, AAV9, or AAVrh.10 vector) or a different viral vector (e.g., a different AAV2, AAV9 and an AAVrh.10). Still other combinations may be selected using the viral vectors and non-viral delivery systems described herein.

[0370] The ABCD1 cDNA sequences described herein can be generated in vitro and synthetically, using techniques well known in the art. For example, the PCR-based accurate synthesis (PAS) of long DNA sequence method may be utilized, as described by Xiong et al, PCR-based accurate synthesis of long DNA sequences, Nature Protocols 1, 791-797 (2006). A method combining the dual asymmetrical PCR and overlap extension PCR methods is described by Young and Dong, Two-step total gene synthesis method, Nucleic Acids Res. 2004; 32(7): e59. See also, Gordeeva et al, J Microbiol Methods. Improved PCR-based gene synthesis method and its application to the Citrobacter freundii phytase gene codon modification. 2010 May; 81(2): 147-52. Epub 2010 Mar. 10; see, also, the following patents on oligonucleotide synthesis and gene synthesis, Gene Seq. 2012 April; 6(1): 10-21; U.S. Pat. Nos. 8,008,005; and 7,985,565. Each of these documents is incorporated herein by reference. In addition, kits and protocols for generating DNA via PCR are available commercially. These include the use of polymerases including, without limitation, Taq polymerase; OneTaq® (New England Biolabs); Q5® High-Fidelity DNA Polymerase (New England Biolabs); and GoTaq® G2 Polymerase (Promega). DNA may also be generated from cells transfected with plasmids containing the hOTC sequences described herein.

[0371] Kits and protocols are known and commercially available and include, without limitation, QIAGEN plasmid kits; Chargeswitch® Pro Filter Plasmid Kits (Invitrogen); and GenElute™ Plasmid Kits (Sigma Aldrich). Other techniques useful herein include sequence-specific isothermal amplification methods that eliminate the need for thermocycling. Instead of heat, these methods typically employ a strand-displacing DNA polymerase, like Bst DNA Polymerase, Large Fragment (New England Biolabs), to separate duplex DNA. DNA may also be generated from RNA molecules through amplification via the use of Reverse Transcriptases (RT), which are RNA-dependent DNA Polymerases. RTs polymerize a strand of DNA that is complimentary to the original RNA template and is referred to as cDNA. This cDNA can then be further amplified through PCR or isothermal methods as outlined above. Custom DNA can also be generated commercially from companies including, without limitation, GenScript; GENEWIZ®; GeneArt® (Life Technologies); and Integrated DNA Technologies.

[0372] It is to be noted that the term “a” or “an” refers to one or more. As such, the terms “a” (or “an”), “one or more,” and “at least one” are used interchangeably herein.

[0373] The words “comprise”, “comprises”, and “comprising” are to be interpreted inclusively rather than exclusively. The words “consist”, “consisting”, and its variants, are to be interpreted exclusively, rather than inclusively. While various embodiments in the specification are presented using “comprising” language, under other circumstances, a related embodiment is also intended to be interpreted and described using “consisting of’ or “consisting essentially of’ language.

[0374] As used herein, “disease”, “disorder” and “condition” are used interchangeably, to indicate an abnormal state in a subject.

[0375] As used herein, the term “about” or “˜” means a variability of 10% from the reference given, unless otherwise specified.

[0376] The term “regulation” or variations thereof as used herein refers to the ability of a composition to inhibit one or more components of a biological pathway.

[0377] Unless defined otherwise in this specification, technical and scientific terms used herein have the same meaning as commonly understood by one of ordinary skill in the art and by reference to published texts, which provide one skilled in the art with a general guide to many of the terms used in the present application.

### EXAMPLES

[0378] The following examples are provided in order to illustrate the invention but are not to be construed as limiting the scope of the claims in any way. The plasmid sequences used in the EXAMPLES herein are as identified by the SEQ ID NOs shown in FIGS. 10-12, and in the Sequence Listing.

### Materials and Methods

[0379] The following examples unless otherwise indicated were effected using the AAV-hABCD1 constructs. These AAV-hABCD1 constructs are intended to be exemplary and the invention embraces the construction and use of variants thereof.

### Example 1: Intrathecal Administration of AAV9 Vector in ABCD1 Knockout Mice

[0380] In this example a short-term in vivo study was conducted in order to compare the effects of different AAV9 on ABCD1 expression levels in the spinal cord and CNS, and overt toxicity. The objective of these experiments was the identification of suitable candidates for treating ALD or AMN.

[0381] AAV vectors comprising AAV9 capsids were produced briefly as described in Gong Y. et al., 2015 May; Mol Ther. 23(5):824-834 and Gong Y. et al., 2019 May; Hum Gene Ther. 30(5):544-555. Briefly, Human 293T cells were initially transfected with a pool of siRNA to ABCD1 using the DharmaFECT reagent, and 24 hours later cells were transfected with a rAAV Genome Vector plasmid of interest (plasmid for AAV-CBA-ABCD1-WPRE(original), AAV-CBA-ABCD1-WPRE X inactiv., or AAV-CBA-ABCD1 (no WPRE)), the Rep/Cap plasmid pAAV2/9, and Ad helper plasmid pFd6. rAAV vectors were purified via CsCl gradient centrifugation, followed by desalting and concentration. The rAAV titers were determined by qPCR. The siRNA was included to reduce ABCD1 expression during the production process.

[0382] The pAAV2/9 plasmid used comprised the full construct sequence of SEQ ID NO: 700, which comprises: an AAV2 p5 promoter (SEQ ID NO: 710) from which AAV2 REP78 (SEQ ID NO: 711) and AAV2 REP68 (SEQ ID NO: 712) may be produced; an AAV2 p19 promoter (SEQ ID NO: 720) from which AAV2 REP52 (SEQ ID NO: 721) and AAV2 REP40 (SEQ ID NO: 722) may be produced; and a AAV2 p40 promoter (SEQ ID NO: 730) from which AAV9 VP1 (SEQ ID NO: 731), AAV9 VP2 (SEQ ID NO: 732), and AAV9 VP3 (SEQ ID NO: 733).

[0383] In these experiments the candidate selection criteria included identifying vectors that reduced VLCFA in the CNS equal to or greater than a vector containing a Woodchuck Hepatitis Virus (WHP) Posttranscriptional Regulatory Element (WPRE) in the absence of overt toxicity and identifying constructs which optimized biodistribution while achieving ABCD1 expression levels approximately equal to WT in individual cells.

[0384] In this experiment the results of which are contained in FIG. 1 different groups of 5 mice (ABCD1 knock-out (KO) mice which were about 3 months of age were each intrathecally administered a bolus injection of 1.2×10¹¹ genome copies (GC's) of different AAV vectors (see FIGS. 10-11) which were contained in phosphate buffered saline (PBS) vehicle, i.e., “AAV.ABCD1.WPRE” or “AAV-CBA-hABCD1-WPRE” (AAV vector containing ABCD1 and WPRE coding sequences, depicted in FIG. 10); “AAV.ABCD1.WPRE-Xinact” or “AAV-CBA-hABCD1-WPRE-Xinact” (AAV vector modified to comprise modified WPRE that encodes inactivated X protein, depicted in FIGS. 10 and 11A); and “AAV.ABCD1” or “AAV-CBA-hABCD1” (original AAV vector (AAV-CBA-hABCD1-WPRE) modified to remove WPRE, depicted in FIGS. 10 and 11B) or were intrathecally administered only the PBS vehicle carrier. Bolus administration was chosen as the mode of administration as it was found to be more efficient than pump infusion. Also, a control group of 5 wild-type (WT) mice were not treated.

[0385] After 3 weeks the different groups of mice were sacrificed and brain, spinal cord, dorsal root ganglion (DRG), heart and liver were harvested (with the livers being frozen for later analysis). ABCD1 expression levels as well as beta actin expression levels (for normalization) were detected in the harvested tissues by Western blot methods. These results are contained in FIG. 1. As can be seen therefrom ABCD1 expression was detected in all groups but was lower in the group administered AAV9 virus lacking a WPRE (FIG. 1A). As expected, no ABCD1 signal was detected in the negative control null mice. Quantitation of the protein expression results showed similar levels of ABCD1 protein expression between the mice treated with the vector containing the original WPRE sequence (“WPRE-original”) and with the vector containing the modified X-protein sequence (“X-inactivated”) while the protein expression from the vector without the WPRE sequence (“No WPRE”) was reduced.

### Example 2: Intrathecal Administration of Different AAV9 Constructs

[0386] A second longer duration in vivo study was conducted wherein different groups of ABCD1 KO mice (n=5 each group) were injected intrathecally with different dosages i.e., 1×10¹¹ gc/mouse or 3×10¹¹ gc/mouse with the same exemplary AAV9 constructs shown in FIGS. 10-11. AAV viral vectors were generated and the viral titers were determined as in Example 1. As in Example 1, ABCD1 KO mice which were about 3 months of age were each intrathecally administered with a bolus of AAV9, i.e., a bolus injection of 1×10¹¹ genome copies (GC's) or 3×10¹¹ GCs of “AAV9.ABCD1.WPRE” (original AAV9 vector containing ABCD1 coding sequences, depicted in FIG. 10); “AAV9.ABCD1.WPRE-Xinact” (original AAV9 vector modified to comprise modified WPRE that encodes inactivated X protein, depicted in FIGS. 10 and 11A); or “AAV9.ABCD1” (original AAV9 vector modified to remove WPRE, depicted in FIGS. 10 and 11B) or were intrathecally administered only PBS vehicle carrier. As in the previous experiment a control group of 5 wild-type (WT) mice were not treated.

[0387] These mice were sacrificed 5 weeks post-injection and tissues were again collected for detection of ABCD1 levels in the spinal cords. In these experiments ABCD1 expression levels were detected in 2 mice from each group again using Western Blot techniques. These results may be found in FIG. 2.

[0388] In the figure ABCD1 expression levels for the mice administered 1×10¹¹ gc/mouse and 3×10¹¹ gc doses are on separate blots. The 2 second and 15 second exposure time noted in the figure refer to the ABCD1 blot. The beta actin levels on the blots are for a 10 second exposure for the 10¹¹ gc/dose and a 5 second exposure time for the 3×10¹¹ gc dosage. ABCD1 expression was detected for all groups treated with AAV9 constructs containing the ABCD1 gene but was lower in the group administered AAV9 construct lacking a WPRE.

[0389] The dose-response of ABCD1 expression was also assessed. As shown in FIG. 3 the dose-response of the ABCD1 Western blot data in mice administered 1×10¹¹ gc/mouse or 3×10¹¹ gc doses of the AAV9 constructs containing a WPRE or an X-inactivated WPRE or AAV9 constructs lacking a WPRE was compared. The Western blot results revealed that ABCD1 expression levels were higher in the mice administered the 3×10¹¹ gc dose of the AAV9 construct containing the WPRE or containing the X-inactivated WPRE compared to those administered the 1×10¹¹ gc dose of the AAV9 construct containing the WPRE or containing the X-inactivated WPRE. The results further showed that mice administered the AAV9 construct lacking a WPRE had considerably reduced ABCD1 expression levels.

### Example 3: Effects of Construct Differences on In Vitro VLCFA-Reducing Effects

[0390] Since AAV9-CBA-ABCD1-WPRE (Xinact) was shown in Examples 1 and 2 to induce ABCD1 protein expression equivalent to the level induced by AAV9-CBA-ABCD1-WPRE, the effects of AAV9-CBA-ABCD1-WPRE (Xinact) on VLCFA reduction were investigated. In this experiment mixed glial cultures were produced from ABCD1 KO mice. AAV viral vectors AAV9-CBA-ABCD1-WPRE (Original) and AAV9-CBA-ABCD1-WPRE (Xinact) were generated as in Example 1. On day 12 post culture cells from the mixed glial cultures were transduced with AAV9-CBA-ABCD1 vectors at different MOIs (1×10⁵, 2.5×10⁵, 5×10⁵ and 1×10⁶ gene copies per cell). 4 days post transduction the cells were harvested for VLCFA analysis. A subset of wells was also used for Western Blot analysis to confirm that the cells were successfully transduced.

[0391] VLCFA analysis results are shown in FIG. 4A (C26:0 levels) and FIG. 4B (ratio of C26:0 to C22:0). The results demonstrated that both AAV9 vectors lowered VLCFA levels in a dose-dependent manner and that VLCFA reduction by AAV9-CBA-ABCD1-WPRE (Xinact) was equivalent to that by AAV9-CBA-ABCD1-WPRE (Original). The results also showed that highest dose was equivalent to wild-type VLCFA levels.

### Example 4: AAV-hABCD1 Vector Modifications

[0392] Another potential candidate AAV-hABCD1 construct was engineered in an effort to enhance ABCD1 expression without using WPRE and to improve other properties desired for manufacture and clinical use. Particularly modified AAV-hABCD1 vectors SBT101 and OB1005 was derived from a parental AAV construct AAV-CBA-ABCD1 [no WPRE] by a number of modifications.

[0393] In designing SBT101 from AAV-CBA-ABCD1 [no WPRE], the sequence downstream of 5′ ITR was modified; and a hABCD1 5′ UTR and a hABCD1 3′ UTR sequences were added upstream and downstream, respectively, of the hABCD1 cDNA sequence.

[0394] In designing OB1005 from AAV-CBA-ABCD1 [no WPRE], the 5′ ITR and 3′ ITR sequences were shortened; ABCD1-conding sequence was modified to eliminate alternative open reading frames in order to remove its potential to express non-self-antigens; a Kozak sequence (ccacc) was added upstream of the start site to potentially improve ABCD1 translation; the second polyA signal (bGH polyA) was eliminated in order to reduce the size of the transgene cassette; and the backbone comprising the AAV2 vector was changed from pUC57 to pUC118 to improve ITR stability during scale up.

[0395] In designing OB1010 from AAV-CBA-ABCD1 [no WPRE], the 5′ ITR and 3′ ITR sequences were shortened; a hABCD1 5′ UTR and a hABCD1 3′ UTR sequences were added upstream and downstream, respectively, of the hABCD1 cDNA sequence; and the backbone comprising the AAV2 vector was changed from pUC57 to pUC118 to improve ITR stability during scale up.

[0396] The resulting AAV vector genome plasmids pSBT101, pOB1005, and pOB1010) are respectively schematically depicted in FIG. 5, FIG. 6, and FIG. 7, respectively, The schematics and sequence details of these constructs are also provided in FIGS. 12A-E.

### Example 5: Comparing ABCD1 Expression (pSTB101 vs pOB1005)

[0397] An experiment was then conducted to compare the performance of pSBT101 and pOB1005 constructs in transient transfection experiments in HEK293 cells. These results are summarized in FIG. 8. ABCD1 expression levels measured by Western blot are shown in FIG. 8A. In FIG. 8B, the measured ABCD1 expression levels are compared in the bar graph in bars 2 (pSBT101, which contains no WPRE) and 3 (pOB1005). Bar 1 is the untransfected control. All bars correspond to the lanes on the gel with the same number label. Relative chemiluminescence represents ABCD1 values which are again normalized to beta-actin.

[0398] In these experiments HEK293 cells were transfected side-by-side with plasmids and expression 3 days post transfection was evaluated in cell lysates by Western blotting with the Western blots being quantified by use of densitometry. As can be seen from the results in the figure HEK293 cells transfected with the modified construct pOB1005 showed demonstrably higher ABCD1 expression than HEK293 cells transfected with pSBT101.

### Example 6: Assessment of Packageability into AAV from pSBT101 and pOB1005 Constructs at Pilot Scale in Adherent Cells

[0399] Additional experiments were conducted comparing the performance of pSBT101, which lacks a WPRE, with pOB1005 in triple transfection experiments effected in HEK293 cells. In these experiments HEK293 cells were transfected side-by-side with the pSBT101 or pOB1005 plasmid, alongside rep/cap plasmid (pAAV2/9 (SEQ ID NO: 700)) and Ad helper plasmid, and rAAV vectors were harvested via CsCl gradient centrifugation, followed by desalting and concentration. Packageability was then evaluated in cell lysates and supernatant by quantification of the vector genome copies post DNase treatment using ddPCR and primers specific to the transgene cassette. As was hoped pOB1005 showed demonstrably better productivity (a little over 2.5-fold increase, from 5.66×10⁹ vector gc per prep to 1.48×10¹⁰ vector gc per prep) in these small-scale triple transfection tests. FIG. 9 contains the results of these packageability experiments. Both pSBT101 and pOB1005 demonstrated satisfactory packageability.

### Example 7: Construction of Additional Constructs with Shortened AAV2 ITRs

[0400] In an effort to further explore candidate constructs without an WPRE that may recover the ABCD1 expression and/or yield reduced in AAV-CBA-ABCD1 [no WPRE]relative to the original construct containing a WPRE, various constructs containing a set of the shortened 5′ ITR and shortened 3′ ITR as in pOB1005 were designed: pOB1010, pOB1011, pOB1012, pOB1013, pOB1015, and pOB1017, all of which utilize the pUC118 backbone. AAV vectors generated from pOB1010, pOB1011, pOB1012, pOB1013, pOB1015, and pOB1017 were named OB1010, OB1011, OB1012, OB1013, OB1015, and OB1017, respectively, and alternatively referred to as v1, v2, v3, v4, v5, v6, v7, and v8, respectively.

[0401] The schematic of the AAV genome (to be packaged in AAV particles) contained in each construct is shown in FIG. 12A. pOB1005, pOB1012, and pOB1013 respectively contain the Kozak sequence immediately before the start codon of ABCD1 and nine mutations within the ABCD1-encoding sequence relative to the wild-type ABCD1-encoding sequence contained in pSBT101. pOB1015 and pOB1017 respectively contain three mutations within the ABCD1-enconding sequence relative to the wild-type ABCD1-enconding sequence contained in pSBT 101. pOB1011, pOB1013, and pOB1015 do not have an SV40 poly A signal, while still containing a bGH poly A signal. SEQ ID NOs assigned to full plasmids are indicated in FIG. 12B. All full plasmid sequences are further broken into segments, all of which are named as indicated in FIG. 12B and assigned with SEQ ID NOS. When both SV40 and bGH poly A sequences are present, the sequence from the start of SV40 pA to the end of bGHpA was named “total polyA signal” and was assigned with an additional SEQ ID NO. Schematics of individual constructs are also depicted with reference to SEQ ID NOs in FIG. 12C-12J. The sequences referred to in FIGS. 12B and 12C-12J are all included in the Sequence Listing.

### Example 8: ABCD1 Protein Expression Comparison

[0402] AAV vectors were produced using the new plasmid constructs described in Example 7. Briefly, HEK293 cells were transfected with (1) a rAAV Genome Vector plasmid of interest (pSBT101, pOB1005, pOB1010, pOB1011, pOB1012, pOB1013, pOB1015, or pOB1017) (2) a plasmid encoding the AAV Rep and Cap protein (pAAV2/9 (SEQ ID NO: 700)) and (3) adenovirus helper plasmid (pALD-X80). The rAAV vectors were harvested via CsCl gradient centrifugation, followed by desalting and concentration. The rAAV titers were determined by ddPCR.

[0403] Effects of different plasmid constructs on ABCD1 protein expression were assessed. Briefly, ABCD1 knockout Lec2 cells were transduced with different AAV9-CBA-ABCD1 vectors (AAV vectors SBT101, OB1005, OB1010, OB1011, OB1012, OB1013, OB1015, and GB1017) or the control vector (AAV9-CBA-empty vector “GB1008” generated using the pOB1008 plasmid) at an MOI of 1×10³, 1×10⁴, 1×10⁵, 1×10⁶, and 5×10⁶ gene copies per cell. 3 days post transduction, ABCD1 protein expression levels were measured by in-cell western blot (ICWB). ABCD1 protein levels were plotted against the MOI and the dose-expression curve was fitted as described in FIGS. 13A-13D. Estimated relative potential (relative to pOB1008 in FIGS. 13A-13C and relative to pSBT101 in FIG. 13D), standard error, 95% confidence interval, and EC50 values for each AAV vector were calculated. FIG. 13E shows exemplary western blot wells and relative intensity data.

[0404] As shown in FIGS. 13A-13D, all of the new constructs described in Example 7 (v1-v8) successfully lead to ABCD1 protein expression higher than the level resulting from the control construct (pOB1008). Furthermore, OB1010, OB1015, and OB1017 lead to significantly higher ABCD1 expression compared to pSBT101 (FIGS. 13A and 13D), meaning that pOB1010, pOB1015, and pOB1017 achieved the goal of recovering the ABCD1 expression that was reduced in pSBT101, without using a WPRE. This is particularly surprising and unexpected considering that the expression was recovered without introducing another enhancer in place of the WPRE.

### Example 9: VLCFA Reduction Comparison

[0405] To test whether AAV vectors that resulted in high ABCD1 expression (GB1010, OB1015, and OB1017) cause reduction in VLCFA, ABCD1 KO Lec2 cells were transduced with AAV vectors OB1010, OB1015, and OB1017 produced as described in Example 8 at an MOI of 1×10³, 1×10⁴, 1×10⁵, 1×10⁶, and 5×10⁶ gene copies per cell, and VLCFA levels were quantified. As shown in FIG. 14, all of OB1010, OB1015, and OB1017 successfully reduced VLCFA as demonstrated by the reduced C26:0/C22:0 ratio. Interestingly, the VLCFA reduction trend was in accordance with the ABCD1 expression trend (see FIG. 13D), i.e., higher-ABCD1 expressors led to more pronounced VLCFA reduction.

### Example 10: Dose Dependency in VLCFA Reduction

[0406] To understand the relationship between VLCFA reduction effects and AAV9-CBA-ABCD1 (OB series) doses or ABCD1 expression levels more closely, the rAAV vector OB1010 was used as an example. Two different sets of OB1010 vectors produced by different vendors (“STC” and “VBL”) were tested in parallel. rAAV vectors by the two vendors were produced essentially as described in Example 8, but while VBL used ultra-centrifugation for rAAV purification, STC used AAV9 affinity-based purification. Briefly, mixed glial cultures were produced from WT or ABCD1 KO mice. On day 12 post culture, cells from the ABCD1 KO mixed glial cultures were transduced with three different doses (low, mid, and high) of the OB1010 vector. The low, mid, and high doses were 3.3×10⁴, 1.0×10⁵, and 5×10⁵ virus genomes per cell, respectively. WT mixed glial cells were untreated. 5 days post transduction the cells were harvested for VLCFA analysis and ABCD1 protein quantification by Western Blot.

[0407] As demonstrated in FIG. 15A, regardless of the vendor, OB1010 reduced both C26:0/C22:0 ratio and C26:0 amounts in a vector dose-dependent manner. When C26:0/C22:0 ratio or C24:0/C22:0 ratio were plotted against the ABCD1 protein expression levels, both reduction in C26:0/C22:0 ratio and in C24:0/C22:0 ratio correlated with increased ABCD1 protein levels, as shown in FIG. 15B.

[0408] The same experiments were performed using a few other AAV-CBA-ABCD1 vectors such as pOB101011 produced by different vendors, and similar dose- and/or protein level-dependent VLCFA reduction was observed. Relationship between ABCD1 expression and various VLCFA parameters (absolute amount and ratio), in which data from all tested AAV-CBA-ABCD1 vectors from different vendors are combined, is summarized in FIG. 15C. As shown in the top four graphs in FIG. 15C, increased ABCD1 levels were associated with lower VLCFA (C26:0 and C24:0) and higher shorter fatty acid (C16:0), while C22:0 did not seem to be influenced by ABCD1 expression. When the fatty acid ratios were plotted against ABCD1 protein expression, increased ABCD1 levels were associated with lower C26:0/C22:0 and C24:0/C22:0 ratios, as shown in the bottom two graphs in FIG. 15C.

### Example 11: In Vivo Effects Elicited by SBT101

[0409] To test whether AAV9-CBA-ABCD1 vectors can restore ABCD1 expression to reduce VLCFA in vivo, ABCD1 KO mice were intrathecally administered with various amounts of the rAAV SBT101 produced as described in Example 8. The administration doses were low, mid, high, which were 6.1×10⁸ vector genome copies (vg), 1.8×10⁹ vg, and 6.1×10⁹ vg, respectively, as determined by ddPCR. Untreated WT control was also included. Eight weeks post administration, spinal cords were collected. The vector and diploid genomes and mitochondrial DNA (mtDNA) were quantified by ddPCR, and ABCD1 protein levels were quantified by immunoassay coupled to capillary electrophoresis (immuno-CE) using JESS (Protein Simple™).

[0410] Results are summarized in FIG. 16. As shown in the left and middle graphs, dose-dependent vector genome levels and dose-dependent ABCD1 protein expression were confirmed. Regarding the mtDNA, mtDNA is a proxy for the number of mitochondria and mtDNA is reduced in ABCD1 knockout mice compared to wild-type mice, as shown in the right graph. Without wishing to be bound by theory, reduced mtDNA in ABCD1 KO is suggested to be linked to reduced beta-oxidation of VLCFA in the peroxisome, and therefore an increase or recovery in the mtDNA levels is a surrogate marker of an increase or recovery in beta-oxidation of VLCFA. As demonstrated in the right graph, mtDNA levels recovered in a vector dose-dependent manner, and particularly the highest dose provided significant increase in mtDNA relative to untreated and replenished approximately half of mtDNA that was lost by ABCD1 gene knockout. Therefore, it is concluded that the ABCD1-encoding AAV vector without an WPRE successfully expressed ABCD1 sufficiently in glial cells to recover VLCFA transportation into peroxisomes for beta-oxidation in vivo.

### Example 12: rAAV Vector Packageability Comparison

[0411] To test if pOB1010 provides efficient rAAV vector packaging, pOB1010, pSBT101, and pOB1008 plasmids were compared.

[0412] HEK293 cells were transfected with (1) a rAAV Genome Vector plasmid of interest (pSBT101, pOB1010, or pOB1008), (2) an AAV Rep/Cap plasmid (pAAV2/9 (SEQ ID NO: 700), and (3) an adenovirus helper plasmid (pALD-X80). rAAV vectors were harvested via CsCl gradient centrifugation, followed by desalting and concentration. The same amounts (copies) of the genome vector plasmids were used for each AAV vector and the same amounts (copies) of the Rep/Cap plasmid and the adenovirus helper plasmids were used for each AAV vector. The resulting virus titers were compared by ddPCR on the hABCD1 gene (or on the SV40 polyA in the case of pOB1008) and by qPCR on the CMV enhancer gene. These results are summarized in FIG. 17.

[0413] In the preceding procedures, various methods and materials have been described. It will, however, be evident that various modifications and changes may be made thereto, and additional procedures may be implemented, without departing from the broader scope of the exemplary procedures as set forth in the claims that follow.

### EQUIVALENTS AND SCOPE

[0414] In the claims, articles such as “a,” “an,” and “the” may mean one or more than one unless indicated to the contrary or otherwise evident from the context. Claims or descriptions that include “or” between one or more members of a group are considered satisfied if one, more than one, or all of the group members are present in, employed in, or otherwise relevant to a given product or process unless indicated to the contrary or otherwise evident from the context. The invention includes embodiments in which exactly one member of the group is present in, employed in, or otherwise relevant to a given product or process. The invention includes embodiments in which more than one, or all of the group members are present in, employed in, or otherwise relevant to a given product or process.

[0415] Furthermore, the invention encompasses all variations, combinations, and permutations in which one or more limitations, elements, clauses, and descriptive terms from one or more of the listed claims is introduced into another claim. For example, any claim that is dependent on another claim can be modified to include one or more limitations found in any other claim that is dependent on the same base claim. Where elements are presented as lists, e.g., in Markush group format, each subgroup of the elements is also disclosed, and any element(s) can be removed from the group. It should it be understood that, in general, where the invention, or aspects of the invention, is/are referred to as comprising particular elements and/or features, certain embodiments of the invention or aspects of the invention consist, or consist essentially of, such elements and/or features. For purposes of simplicity, those embodiments have not been specifically set forth in haec verba herein.

[0416] It is also noted that the terms “comprising” and “containing” are intended to be open and permits the inclusion of additional elements or steps. Where ranges are given, endpoints are included. Furthermore, unless otherwise indicated or otherwise evident from the context and understanding of one of ordinary skill in the art, values that are expressed as ranges can assume any specific value or sub-range within the stated ranges in different embodiments of the invention, to the tenth of the unit of the lower limit of the range, unless the context clearly dictates otherwise.

[0417] This application refers to various issued patents, published patent applications, journal articles, and other publications, all of which are incorporated herein by reference. If there is a conflict between any of the incorporated references and the instant specification, the specification shall control. In addition, any particular embodiment of the present invention that falls within the prior art may be explicitly excluded from any one or more of the claims. Because such embodiments are deemed to be known to one of ordinary skill in the art, they may be excluded even if the exclusion is not set forth explicitly herein. Any particular embodiment of the invention can be excluded from any claim, for any reason, whether or not related to the existence of prior art.

[0418] Those skilled in the art will recognize or be able to ascertain using no more than routine experimentation many equivalents to the specific embodiments described herein. The scope of the present embodiments described herein is not intended to be limited to the above Description, but rather is as set forth in the appended claims. Those of ordinary skill in the art will appreciate that various changes and modifications to this description may be made without departing from the spirit or scope of the present invention, as defined in the following claims.

1.-86. (canceled)

87. A method of treating adrenoleukodystrophy (ALD) and/or adrenomyeloneuropathy (AMN) in a subject in need thereof, the method comprising administering to the subject a therapeutically effective amount of a recombinant adeno-associated viral (AAV) vector comprising:
(a) an AAV9 capsid; and
(b) a recombinant AAV vector genome comprising, in a 5′ to 3′ direction, a truncated 5′ AAV2 inverted terminal repeat sequence, a cytomegalovirus enhancer, a chicken beta-actin promoter, a beta-actin exon, a chimeric intron, a rabbit beta-globin exon, a human ATP-binding cassette, sub-family D, member 1 (ABCD1) 5′ untranslated region, a human ABCD1 coding sequence, a human ABCD1 3′ untranslated region, an SV40 polyadenylation signal sequence, a bovine growth hormone polyadenylation signal sequence, and a truncated 3′ AAV2 inverted terminal repeat sequence, wherein the recombinant AAV vector genome does not comprise a woodchuck post-transcriptional regulatory element.

88. The method of claim 87, wherein the truncated 5′ AAV2 inverted terminal repeat sequence comprises the sequence of SEQ ID NO: 11001.

89. The method of claim 87, wherein the cytomegalovirus enhancer comprises the sequence of SEQ ID NO: 11005.

90. The method of claim 87, wherein the chicken beta-actin promoter comprises the sequence of SEQ ID NO: 11007.

91. The method of claim 87, wherein the beta-actin exon comprises the sequence of SEQ ID NO: 11008.

92. The method of claim 87, wherein the chimeric intron comprises the sequence of SEQ ID NO: 11009.

93. The method of claim 87, wherein the rabbit beta-globin exon comprises the sequence of SEQ ID NO: 11085.

94. The method of claim 87, wherein the human ABCD1 5′ untranslated region comprises the sequence of SEQ ID NO: 11010.

95. The method of claim 87, wherein the human ABCD1 coding sequence comprises the sequence of SEQ ID NO: 11012.

96. The method of claim 87, wherein the human ABCD1 3′ untranslated region comprises the sequence of SEQ ID NO: 11013.

97. The method of claim 87, wherein the SV40 polyadenylation signal comprises the sequence of SEQ ID NO: 11014.

98. The method of claim 87, wherein the bovine growth hormone polyadenylation signal comprises the sequence of SEQ ID NO: 11016.

99. The method of claim 87, wherein the truncated 3′ AAV2 inverted terminal repeat sequence comprises the sequence of SEQ ID NO: 11018.

100. The method of claim 87, wherein the administering is by intrathecal injection.

101. The method of claim 100, wherein the intrathecal injection is intrathecal-lumbar (IT-L) injection.

102. A method of treating ALD and/or AMN in a subject in need thereof, the method comprising administering to the subject a therapeutically effective amount of a recombinant AAV vector comprising: an AAV9 capsid and a recombinant AAV vector genome comprising the sequence of SEQ ID NO: 11050.

103. The method of claim 102, wherein the administering is by intrathecal injection.

104. The method of claim 103, wherein the intrathecal injection is IT-L injection.

105. A method of treating ALD and/or AMN in a subject in need thereof, the method comprising administering to the subject a therapeutically effective amount of a recombinant AAV vector comprising: an AAV9 capsid and a recombinant AAV vector genome comprising the sequence of SEQ ID NO: 11060.

106. The method of claim 105, wherein the administering is by intrathecal injection.

107. The method of claim 106, wherein the intrathecal injection is IT-L injection.

The application's sequence listing, which the Patent Office published only in electronic form, follows.

SEQUENCE LISTING (11785 sequences)

SEQ ID NO: 1 - DNA, 2276 bp, synthetic construct
  misc_feature 1..2276: note = Full, nt 1133-3408 of pOB1005 full plasmid as defined in US62/955667
  source 1..2276: mol_type = other DNA
attgggatagcttccaccatgccggtgctctctaggccccggccctggcgggggaacacgctgaagcgcacggccgtgctcctggccctcgcggcctatggagcccacaaagtctaccccttggtgcgccagtgcctggccccggctaggggtcttcaggcgcccgccggggagcccacgcaggaggcctccggggtcgcggcggccaaagctggcatgaaccgggtattcctgcagcggctcctctggctcctgcggctgctgttcccccgggtcctctgccgggagacggggctgctggccctgcactcggccgccttggtgagccgcaccttcctgtcggtgtacgtggcccgcctggacggaaggctggcccgctgcatcgtccgcaaggacccgcgggcttttggctggcagctgctgcagtggctcctcatcgccctccctgctaccttcgtcaacagtgccatccgttacctggagggccaactggccctgtcgttccgcagccgtctggtggcccacgcctaccgcctctacttctcccagcagacctactaccgggtcagcaacatggacgggcggcttcgcaaccctgaccagtctctgacggaggacgtggtggcctttgcggcctctgtggcccacctctactccaacctgaccaagccactcctggacgtggctgtgacttcctacaccctgcttcgggcggcccgctcccgcggagccggcacagcctggccctcggccatcgccggcctcgtggtgttcctcacggccaacgtgctgcgggccttctcgcccaagttcggggagctggtggcagaggaggcgcggcggaagggggagctgcgctacatgcactcgcgtgtggtggccaactcggaggagatcgccttctatgggggccatgaggtggagctggccctgctacagcgctcctaccaggacctggcctcgcagatcaacctcatccttctggaacgcctctggtatgttatgctggagcagttcctcatgaagtatgtgtggagcgcctcgggcctgctcatggtggctgtccccatcatcactgccactggctactcagagtcagatgcagaggccgtgaagaaggcagccttggaaaagaaggaggaggagctggtgagcgagcgcacagaagccttcactattgcccgcaacctcctgacagcggctgcagatgccattgagcggatcatgtcgtcgtacaaggaggtgacggagctggctggctacacagcccgggtgcacgagatgttccaggtatttgaagatgttcagcgctgtcacttcaagaggcccagggagctagaggacgctcaggcggggtctgggaccataggccggtctggtgtccgtgtggagggccccctgaagatccgaggccaggtggtggacgtggaacaggggatcatctgcgagaacatccccatcgtcacgccctcaggagaggtggtggtggccagcctcaacatcagggtggaggaaggcatgcatctgctcatcacaggccccaatggctgcggcaagagctccctgttccggatcctgggtgggctctggcccacgtacggtggtgtgctctacaagcccccaccccagcgcatgttctacatcccgcagaggccctacatgtctgtgggctccctgcgtgaccaggtgatctacccggactcagtggaggacatgcaaaggaagggctactcggagcaggacctggaagccatcctggacgtcgtgcacctgcaccacatcctgcagcgggagggaggttgggaggctatgtgtgactggaaggacgtcctgtcgggtggcgagaagcagagaatcggcatggcccgcatgttctaccacaggcccaagtacgccctcctggatgaatgcaccagcgccgttagcatcgacgtggaaggcaagatcttccaggcggccaaggacgcgggcattgccctgctctccatcacccaccggccctccctgtggaaataccacacacacttgctacagttcgatggggagggcggctggaagttcgagaagctggactcagctgcccgcctgagcctgacggaggagaagcagcggctggagcagcagctggcgggcattcccaagatgcagcggcgcctccaggagctctgccagatcctgggcgaggccgtggccccagcgcatgtgccggcacctagcccgcaaggccctggtggcctccagggtgcctccacctgataactcgagctagcggccgc

SEQ ID NO: 2 - DNA, 149 bp, synthetic construct
  misc_feature 1..149: note = AAV2 ITR, nt 1-149 of pOB1005 full plasmid as defined in US62/955667
  source 1..149: mol_type = other DNA
cctgcaggcagctgcgcgctcgctcgctcactgaggccgcccgggcaaagcccgggcgtcgggcgacctttggtcgcccggcctcagtgagcgagcgagcgcgcagagagggagtggccaactccatcactaggggttcctgcggccgc

SEQ ID NO: 3 - DNA, 50 bp, synthetic construct
  misc_feature 1..50: note = Primer TGp_10, nt 19-68 of pOB1005 full plasmid as defined in US62/955667
  source 1..50: mol_type = other DNA
ctcgctcgctcactgaggccgcccgggcaaagcccgggcgtcgggcgacc

SEQ ID NO: 4 - DNA, 50 bp, synthetic construct
  misc_feature 1..50: note = Primer TGp_11, Complement of nt 19-68 of pOB1005 full plasmid as defined in US62/955667
  source 1..50: mol_type = other DNA
ggtcgcccgacgcccgggctttgcccgggcggcctcagtgagcgagcgag

SEQ ID NO: 5 - DNA, 18 bp, synthetic construct
  misc_feature 1..18: note = Primer TGp_14, nt 39-56 of pOB1005 full plasmid as defined in US62/955667
  source 1..18: mol_type = other DNA
gcccgggcaaagcccggg

SEQ ID NO: 6 - DNA, 21 bp, synthetic construct
  misc_feature 1..21: note = Primer TGp_11, nt 79-99 of pOB1005 full plasmid as defined in US62/955667
  source 1..21: mol_type = other DNA
cggcctcagtgagcgagcgag

SEQ ID NO: 7 - DNA, 304 bp, synthetic construct
  misc_feature 1..304: note = CMV enhancer, nt 217-520 of pOB1005 full plasmid as defined in US62/955667
  source 1..304: mol_type = other DNA
cgttacataacttacggtaaatggcccgcctggctgaccgcccaacgacccccgcccattgacgtcaataatgacgtatgttcccatagtaacgccaatagggactttccattgacgtcaatgggtggagtatttacggtaaactgcccacttggcagtacatcaagtgtatcatatgccaagtacgccccctattgacgtcaatgacggtaaatggcccgcctggcattatgcccagtacatgaccttatgggactttcctacttggcagtacatctacgtattagtcatcgctattaccatg

SEQ ID NO: 8 - DNA, 22 bp, synthetic construct
  misc_feature 1..22: note = Primer TGp_09, Complement of nt 312-333 of pOB1005 full plasmid as defined in US62/955667
  source 1..22: mol_type = other DNA
cgtcaatggaaagtccctattg

SEQ ID NO: 9 - DNA, 25 bp, synthetic construct
  misc_feature 1..25: note = Primer TGp_13, Complement of nt 389-413 of pOB1005 full plasmid as defined in US62/955667
  source 1..25: mol_type = other DNA
caatagggggcgtacttggcatatg

SEQ ID NO: 10 - DNA, 278 bp, synthetic construct
  misc_feature 1..278: note = chicken beta-actin promoter, nt 522-799 of pOB1005 full plasmid as defined in US62/955667
  source 1..278: mol_type = other DNA
tcgaggtgagccccacgttctgcttcactctccccatctcccccccctccccacccccaattttgtatttatttattttttaattattttgtgcagcgatgggggcggggggggggggggggcgcgcgccaggcggggcggggcggggcgaggggcggggcggggcgaggcggagaggtgcggcggcagccaatcagagcggcgcgctccgaaagtttccttttatggcgaggcggcggcggcggcggccctataaaaagcgaagcgcgcggcgggcg

SEQ ID NO: 11 - DNA, 93 bp, synthetic construct
  misc_feature 1..93: note = beta actin exon, nt 800-892 of pOB1005 full plasmid as defined in US62/955667
  source 1..93: mol_type = other DNA
ggagtcgctgcgcgctgccttcgccccgtgccccgctccgccgccgcctcgcgccgcccgccccggctctgactgaccgcgttactcccacag

SEQ ID NO: 12 - DNA, 231 bp, synthetic construct
  misc_feature 1..231: note = chimeric intron, nt 893-1123 of pOB1005 full plasmid as defined in US62/955667
  source 1..231: mol_type = other DNA
gtgagcgggcgggacggcccttctcctccgggctgtaattagcgcttggtttaatgacggcttgtttcttttctgtggctgcgtgaaagccttgaggggctccgggagctagagcctctgctaaccatgttcatgccttcttctttttcctacagctcctgggcaacgtgctggttattgtgctgtctcatcattttggcaaagaattcctcgaagatccgaaggggttca

SEQ ID NO: 13 - skipped

SEQ ID NO: 14 - DNA, 2235 bp, synthetic construct
  misc_feature 1..2235: note = hABCD1 cleaned up, nt 1151-3385 of pOB1005 full plasmid as defined in US62/955667
  source 1..2235: mol_type = other DNA
atgccggtgctctctaggccccggccctggcgggggaacacgctgaagcgcacggccgtgctcctggccctcgcggcctatggagcccacaaagtctaccccttggtgcgccagtgcctggccccggctaggggtcttcaggcgcccgccggggagcccacgcaggaggcctccggggtcgcggcggccaaagctggcatgaaccgggtattcctgcagcggctcctctggctcctgcggctgctgttcccccgggtcctctgccgggagacggggctgctggccctgcactcggccgccttggtgagccgcaccttcctgtcggtgtacgtggcccgcctggacggaaggctggcccgctgcatcgtccgcaaggacccgcgggcttttggctggcagctgctgcagtggctcctcatcgccctccctgctaccttcgtcaacagtgccatccgttacctggagggccaactggccctgtcgttccgcagccgtctggtggcccacgcctaccgcctctacttctcccagcagacctactaccgggtcagcaacatggacgggcggcttcgcaaccctgaccagtctctgacggaggacgtggtggcctttgcggcctctgtggcccacctctactccaacctgaccaagccactcctggacgtggctgtgacttcctacaccctgcttcgggcggcccgctcccgcggagccggcacagcctggccctcggccatcgccggcctcgtggtgttcctcacggccaacgtgctgcgggccttctcgcccaagttcggggagctggtggcagaggaggcgcggcggaagggggagctgcgctacatgcactcgcgtgtggtggccaactcggaggagatcgccttctatgggggccatgaggtggagctggccctgctacagcgctcctaccaggacctggcctcgcagatcaacctcatccttctggaacgcctctggtatgttatgctggagcagttcctcatgaagtatgtgtggagcgcctcgggcctgctcatggtggctgtccccatcatcactgccactggctactcagagtcagatgcagaggccgtgaagaaggcagccttggaaaagaaggaggaggagctggtgagcgagcgcacagaagccttcactattgcccgcaacctcctgacagcggctgcagatgccattgagcggatcatgtcgtcgtacaaggaggtgacggagctggctggctacacagcccgggtgcacgagatgttccaggtatttgaagatgttcagcgctgtcacttcaagaggcccagggagctagaggacgctcaggcggggtctgggaccataggccggtctggtgtccgtgtggagggccccctgaagatccgaggccaggtggtggacgtggaacaggggatcatctgcgagaacatccccatcgtcacgccctcaggagaggtggtggtggccagcctcaacatcagggtggaggaaggcatgcatctgctcatcacaggccccaatggctgcggcaagagctccctgttccggatcctgggtgggctctggcccacgtacggtggtgtgctctacaagcccccaccccagcgcatgttctacatcccgcagaggccctacatgtctgtgggctccctgcgtgaccaggtgatctacccggactcagtggaggacatgcaaaggaagggctactcggagcaggacctggaagccatcctggacgtcgtgcacctgcaccacatcctgcagcgggagggaggttgggaggctatgtgtgactggaaggacgtcctgtcgggtggcgagaagcagagaatcggcatggcccgcatgttctaccacaggcccaagtacgccctcctggatgaatgcaccagcgccgttagcatcgacgtggaaggcaagatcttccaggcggccaaggacgcgggcattgccctgctctccatcacccaccggccctccctgtggaaataccacacacacttgctacagttcgatggggagggcggctggaagttcgagaagctggactcagctgcccgcctgagcctgacggaggagaagcagcggctggagcagcagctggcgggcattcccaagatgcagcggcgcctccaggagctctgccagatcctgggcgaggccgtggccccagcgcatgtgccggcacctagcccgcaaggccctggtggcctccagggtgcctccacc

SEQ ID NO: 15 - DNA, 20 bp, synthetic construct
  misc_feature 1..20: note = Primer 5 Fwd, nt 2148-2167 of pOB1005 full plasmid as defined in US62/955667
  source 1..20: mol_type = other DNA
tcctcatgaagtatgtgtgg

SEQ ID NO: 16 - DNA, 20 bp, synthetic construct
  misc_feature 1..20: note = Primer 2 Fwd, nt 2151-2170 of pOB1005 full plasmid as defined in US62/955667
  source 1..20: mol_type = other DNA
tcatgaagtatgtgtggagc

SEQ ID NO: 17 - DNA, 20 bp, synthetic construct
  misc_feature 1..20: note = Primer 4 Fwd, nt 2294-2313 of pOB1005 full plasmid as defined in US62/955667
  source 1..20: mol_type = other DNA
acagaagccttcactattgc

SEQ ID NO: 18 - DNA, 19 bp, synthetic construct
  misc_feature 1..19: note = primer Brammer Rev, Complement of nt 2307-2325 of pOB1005 full plasmid as defined in US62/955667
  source 1..19: mol_type = other DNA
aggaggttgcgggcaatag

SEQ ID NO: 19 - DNA, 20 bp, synthetic construct
  misc_feature 1..20: note = Primer 2 Rev, Complement of nt 2408-2427 of pOB1005 full plasmid as defined in US62/955667
  source 1..20: mol_type = other DNA
aatacctggaacatctcgtg

SEQ ID NO: 20 - DNA, 20 bp, synthetic construct
  misc_feature 1..20: note = Primer 4 Rev, Complement of nt 2408-2427 of pOB1005 full plasmid as defined in US62/955667
  source 1..20: mol_type = other DNA
aatacctggaacatctcgtg

SEQ ID NO: 21 - DNA, 20 bp, synthetic construct
  misc_feature 1..20: note = Primer 5 Rev, Complement of nt 2408-2427 of pOB1005 full plasmid as defined in US62/955667
  source 1..20: mol_type = other DNA
aatacctggaacatctcgtg

SEQ ID NO: 22 - DNA, 20 bp, synthetic construct
  misc_feature 1..20: note = CDS primer probe Fwd, nt 2940-2959 of pOB1005 full plasmid as defined in US62/955667
  source 1..20: mol_type = other DNA
ctatgtgtgactggaaggac

SEQ ID NO: 23 - DNA, 20 bp, synthetic construct
  misc_feature 1..20: note = Primer 3 Fwd, nt 2940-2959 of pOB1005 full plasmid as defined in US62/955667
  source 1..20: mol_type = other DNA
ctatgtgtgactggaaggac

SEQ ID NO: 24 - DNA, 20 bp, synthetic construct
  misc_feature 1..20: note = CDS primer probe Rev, Complement of nt 3142-3161 of pOB1005 full plasmid as defined in US62/955667
  source 1..20: mol_type = other DNA
gcaagtgtgtgtggtatttc

SEQ ID NO: 25 - DNA, 20 bp, synthetic construct
  misc_feature 1..20: note = Primer 3 Rev, Complement of nt 3153-3172 of pOB1005 full plasmid as defined in US62/955667
  source 1..20: mol_type = other DNA
atcgaactgtagcaagtgtg

SEQ ID NO: 26 - DNA, 20 bp, synthetic construct
  misc_feature 1..20: note = Primer TGp_19, nt 3250-3269 of pOB1005 full plasmid as defined in US62/955667
  source 1..20: mol_type = other DNA
gcagcagctggcgggcattc

SEQ ID NO: 27 - DNA, 132 bp, synthetic construct
  misc_feature 1..132: note = SV40 polyadenylation signal, nt 3419-3550 of pOB1005 full plasmid as defined in US62/955667
  source 1..132: mol_type = other DNA
gatccagacatgataagatacattgatgagtttggacaaaccacaactagaatgcagtgaaaaaaatgctttatttgtgaaatttgtgatgctattgctttatttgtaaccattataagctgcaataaacaa

SEQ ID NO: 28 - DNA, 141 bp, synthetic construct
  misc_feature 1..141: note = AAV2 ITR, nt 3573-3713 of pOB1005 full plasmid as defined in US62/955667
  source 1..141: mol_type = other DNA
aggaacccctagtgatggagttggccactccctctctgcgcgctcgctcgctcactgaggccgggcgaccaaaggtcgcccgacgcccgggctttgcccgggcggcctcagtgagcgagcgagcgcgcagctgcctgcagg

SEQ ID NO: 29 - DNA, 50 bp, synthetic construct; identical to SEQ ID NO: 4
  misc_feature 1..50: note = Primer TGp_11, Complement of nt 3615-3635 of pOB1005 full plasmid as defined in US62/955667
  source 1..50: mol_type = other DNA

SEQ ID NO: 30 - DNA, 50 bp, synthetic construct; identical to SEQ ID NO: 3
  misc_feature 1..50: note = Primer TGp_10, Complement of nt 3646-3695 of pOB1005 full plasmid as defined in US62/955667
  source 1..50: mol_type = other DNA

SEQ ID NO: 31 - DNA, 50 bp, synthetic construct; identical to SEQ ID NO: 4
  misc_feature 1..50: note = Primer TGp_11, nt 3646-3695 of pOB1005 full plasmid as defined in US62/955667
  source 1..50: mol_type = other DNA

SEQ ID NO: 32 - DNA, 18 bp, synthetic construct
  misc_feature 1..18: note = Primer TGp_14, Complement of nt 3658-3675 of pOB1005 full plasmid as defined in US62/955667
  source 1..18: mol_type = other DNA
gcccgggcaaagcccggg

SEQ ID NO: 33 - DNA, 456 bp, synthetic construct
  misc_feature 1..456: note = f1 bacteriophage origin of replication, nt 3788-4243 of pOB1005 full plasmid as defined in US62/955667
  source 1..456: mol_type = other DNA
acgcgccctgtagcggcgcattaagcgcggcgggtgtggtggttacgcgcagcgtgaccgctacacttgccagcgccttagcgcccgctcctttcgctttcttcccttcctttctcgccacgttcgccggctttccccgtcaagctctaaatcgggggctccctttagggttccgatttagtgctttacggcacctcgaccccaaaaaacttgatttgggtgatggttcacgtagtgggccatcgccctgatagacggtttttcgccctttgacgttggagtccacgttctttaatagtggactcttgttccaaactggaacaacactcaactctatctcgggctattcttttgatttataagggattttgccgatttcggtctattggttaaaaaatgagctgatttaacaaaaatttaacgcgaattttaacaaaatattaacgtttacaattt

SEQ ID NO: 34 - DNA, 20 bp, synthetic construct
  misc_feature 1..20: note = Primer TGp_17, Complement of nt 3915-3934 of pOB1005 full plasmid as defined in US62/955667
  source 1..20: mol_type = other DNA
gagcttgacggggaaagccg

SEQ ID NO: 35 - DNA, 18 bp, synthetic construct
  misc_feature 1..18: note = Primer TGp_07, nt 4330-4347 of pOB1005 full plasmid as defined in US62/955667
  source 1..18: mol_type = other DNA
cgggcttgtctgctcccg

SEQ ID NO: 36 - DNA, 105 bp, synthetic construct
  misc_feature 1..105: note = BLA promoter, nt 4478-4582 of pOB1005 full plasmid as defined in US62/955667
  source 1..105: mol_type = other DNA
cgcggaacccctatttgtttatttttctaaatacattcaaatatgtatccgctcatgagacaataaccctgataaatgcttcaataatattgaaaaaggaagagt

SEQ ID NO: 37 - DNA, 816 bp, synthetic construct
  misc_feature 1..816: note = KanR, nt 4583-5398 of pOB1005 full plasmid as defined in US62/955667
  source 1..816: mol_type = other DNA
atgagccatattcaacgggaaacgtcttgctctaggccgcgattaaattccaacatggatgctgatttatatgggtataaatgggctcgcgataatgtcgggcaatcaggtgcgacaatctatcgattgtatgggaagcccgatgcgccagagttgtttctgaaacatggcaaaggtagcgttgccaatgatgttacagatgagatggtcagactaaactggctgacggaatttatgcctcttccgaccatcaagcattttatccgtactcctgatgatgcatggttactcaccactgcgatccctgggaaaacagcattccaggtattagaagaatatcctgattcaggtgaaaatattgttgatgcgctggcagtgttcctgcgccggttgcattcgattcctgtttgtaattgtccttttaacagcgatcgcgtatttcgtctcgctcaggcgcaatcacgaatgaataacggtttggttgatgcgagtgattttgatgacgagcgtaatggctggcctgttgaacaagtctggaaagaaatgcataaacttttgccattctcaccggattcagtcgtcactcatggtgatttctcacttgataaccttatttttgacgaggggaaattaataggttgtattgatgttggacgagtcggaatcgcagaccgataccaggatcttgccatcctatggaactgcctcggtgagttttctccttcattacagaaacggctttttcaaaaatatggtattgataatcctgatatgaataaattgcagtttcatttgatgctcgatgagtttttctaa

SEQ ID NO: 38 - DNA, 23 bp, synthetic construct
  misc_feature 1..23: note = nt 4652-4674 of pOB1005 full plasmid as defined in US62/955667
  source 1..23: mol_type = other DNA
tatgggtataaatgggctcgcga

SEQ ID NO: 39 - DNA, 589 bp, synthetic construct
  misc_feature 1..589: note = high-copy-number ColE1/pMB1/pBR322/pUC origin of replication, nt 5475-6063 of pOB1005 full plasmid as defined in US62/955667
  source 1..589: mol_type = other DNA
ttgagatcctttttttctgcgcgtaatctgctgcttgcaaacaaaaaaaccaccgctaccagcggtggtttgtttgccggatcaagagctaccaactctttttccgaaggtaactggcttcagcagagcgcagataccaaatactgttcttctagtgtagccgtagttaggccaccacttcaagaactctgtagcaccgcctacatacctcgctctgctaatcctgttaccagtggctgctgccagtggcgataagtcgtgtcttaccgggttggactcaagacgatagttaccggataaggcgcagcggtcgggctgaacggggggttcgtgcacacagcccagcttggagcgaacgacctacaccgaactgagatacctacagcgtgagctatgagaaagcgccacgcttcccgaagggagaaaggcggacaggtatccggtaagcggcagggtcggaacaggagagcgcacgagggagcttccagggggaaacgcctggtatctttatagtcctgtcgggtttcgccacctctgacttgagcgtcgatttttgtgatgctcgtcaggggggcggagcctatggaaa

SEQ ID NO: 40 - DNA, 19 bp, synthetic construct
  misc_feature 1..19: note = Primer TGp_08, Complement of 5550-5568 of pOB1005 full plasmid as defined in US62/955667
  source 1..19: mol_type = other DNA
tggtagctcttgatccggc

SEQ ID NO: 41 - DNA, 21 bp, synthetic construct
  misc_feature 1..21: note = Primer TGp_05, nt 5942-5962 of pOB1005 full plasmid as defined in US62/955667
  source 1..21: mol_type = other DNA
agcgcacgagggagcttccag

SEQ ID NO: 42-99 - skipped (58 entries)

SEQ ID NO: 100 - DNA, 6124 bp, synthetic construct
  misc_feature 1..6124: note = pOB1005 full plasmid
  source 1..6124: mol_type = other DNA
cctgcaggcagctgcgcgctcgctcgctcactgaggccgcccgggcaaagcccgggcgtcgggcgacctttggtcgcccggcctcagtgagcgagcgagcgcgcagagagggagtggccaactccatcactaggggttcctgcggccgcaaccgtctagttattaatagtaatcaattacggggtcattagttcatagcccatatatggagttccgcgttacataacttacggtaaatggcccgcctggctgaccgcccaacgacccccgcccattgacgtcaataatgacgtatgttcccatagtaacgccaatagggactttccattgacgtcaatgggtggagtatttacggtaaactgcccacttggcagtacatcaagtgtatcatatgccaagtacgccccctattgacgtcaatgacggtaaatggcccgcctggcattatgcccagtacatgaccttatgggactttcctacttggcagtacatctacgtattagtcatcgctattaccatggtcgaggtgagccccacgttctgcttcactctccccatctcccccccctccccacccccaattttgtatttatttattttttaattattttgtgcagcgatgggggcggggggggggggggggcgcgcgccaggcggggcggggcggggcgaggggcggggcggggcgaggcggagaggtgcggcggcagccaatcagagcggcgcgctccgaaagtttccttttatggcgaggcggcggcggcggcggccctataaaaagcgaagcgcgcggcgggcgggagtcgctgcgcgctgccttcgccccgtgccccgctccgccgccgcctcgcgccgcccgccccggctctgactgaccgcgttactcccacaggtgagcgggcgggacggcccttctcctccgggctgtaattagcgcttggtttaatgacggcttgtttcttttctgtggctgcgtgaaagccttgaggggctccgggagctagagcctctgctaaccatgttcatgccttcttctttttcctacagctcctgggcaacgtgctggttattgtgctgtctcatcattttggcaaagaattcctcgaagatccgaaggggttcaagctcgcgtattgggatagcttccaccatgccggtgctctctaggccccggccctggcgggggaacacgctgaagcgcacggccgtgctcctggccctcgcggcctatggagcccacaaagtctaccccttggtgcgccagtgcctggccccggctaggggtcttcaggcgcccgccggggagcccacgcaggaggcctccggggtcgcggcggccaaagctggcatgaaccgggtattcctgcagcggctcctctggctcctgcggctgctgttcccccgggtcctctgccgggagacggggctgctggccctgcactcggccgccttggtgagccgcaccttcctgtcggtgtacgtggcccgcctggacggaaggctggcccgctgcatcgtccgcaaggacccgcgggcttttggctggcagctgctgcagtggctcctcatcgccctccctgctaccttcgtcaacagtgccatccgttacctggagggccaactggccctgtcgttccgcagccgtctggtggcccacgcctaccgcctctacttctcccagcagacctactaccgggtcagcaacatggacgggcggcttcgcaaccctgaccagtctctgacggaggacgtggtggcctttgcggcctctgtggcccacctctactccaacctgaccaagccactcctggacgtggctgtgacttcctacaccctgcttcgggcggcccgctcccgcggagccggcacagcctggccctcggccatcgccggcctcgtggtgttcctcacggccaacgtgctgcgggccttctcgcccaagttcggggagctggtggcagaggaggcgcggcggaagggggagctgcgctacatgcactcgcgtgtggtggccaactcggaggagatcgccttctatgggggccatgaggtggagctggccctgctacagcgctcctaccaggacctggcctcgcagatcaacctcatccttctggaacgcctctggtatgttatgctggagcagttcctcatgaagtatgtgtggagcgcctcgggcctgctcatggtggctgtccccatcatcactgccactggctactcagagtcagatgcagaggccgtgaagaaggcagccttggaaaagaaggaggaggagctggtgagcgagcgcacagaagccttcactattgcccgcaacctcctgacagcggctgcagatgccattgagcggatcatgtcgtcgtacaaggaggtgacggagctggctggctacacagcccgggtgcacgagatgttccaggtatttgaagatgttcagcgctgtcacttcaagaggcccagggagctagaggacgctcaggcggggtctgggaccataggccggtctggtgtccgtgtggagggccccctgaagatccgaggccaggtggtggacgtggaacaggggatcatctgcgagaacatccccatcgtcacgccctcaggagaggtggtggtggccagcctcaacatcagggtggaggaaggcatgcatctgctcatcacaggccccaatggctgcggcaagagctccctgttccggatcctgggtgggctctggcccacgtacggtggtgtgctctacaagcccccaccccagcgcatgttctacatcccgcagaggccctacatgtctgtgggctccctgcgtgaccaggtgatctacccggactcagtggaggacatgcaaaggaagggctactcggagcaggacctggaagccatcctggacgtcgtgcacctgcaccacatcctgcagcgggagggaggttgggaggctatgtgtgactggaaggacgtcctgtcgggtggcgagaagcagagaatcggcatggcccgcatgttctaccacaggcccaagtacgccctcctggatgaatgcaccagcgccgttagcatcgacgtggaaggcaagatcttccaggcggccaaggacgcgggcattgccctgctctccatcacccaccggccctccctgtggaaataccacacacacttgctacagttcgatggggagggcggctggaagttcgagaagctggactcagctgcccgcctgagcctgacggaggagaagcagcggctggagcagcagctggcgggcattcccaagatgcagcggcgcctccaggagctctgccagatcctgggcgaggccgtggccccagcgcatgtgccggcacctagcccgcaaggccctggtggcctccagggtgcctccacctgataactcgagctagcggccgctctagaaagagatccagacatgataagatacattgatgagtttggacaaaccacaactagaatgcagtgaaaaaaatgctttatttgtgaaatttgtgatgctattgctttatttgtaaccattataagctgcaataaacaagttgtgcggaccgagcggccgcaggaacccctagtgatggagttggccactccctctctgcgcgctcgctcgctcactgaggccgggcgaccaaaggtcgcccgacgcccgggctttgcccgggcggcctcagtgagcgagcgagcgcgcagctgcctgcaggggcgcctgatgcggtattttctccttacgcatctgtgcggtatttcacaccgcatacgtcaaagcaaccatagtacgcgccctgtagcggcgcattaagcgcggcgggtgtggtggttacgcgcagcgtgaccgctacacttgccagcgccttagcgcccgctcctttcgctttcttcccttcctttctcgccacgttcgccggctttccccgtcaagctctaaatcgggggctccctttagggttccgatttagtgctttacggcacctcgaccccaaaaaacttgatttgggtgatggttcacgtagtgggccatcgccctgatagacggtttttcgccctttgacgttggagtccacgttctttaatagtggactcttgttccaaactggaacaacactcaactctatctcgggctattcttttgatttataagggattttgccgatttcggtctattggttaaaaaatgagctgatttaacaaaaatttaacgcgaattttaacaaaatattaacgtttacaattttatggtgcactctcagtacaatctgctctgatgccgcatagttaagccagccccgacacccgccaacacccgctgacgcgccctgacgggcttgtctgctcccggcatccgcttacagacaagctgtgaccgtctccgggagctgcatgtgtcagaggttttcaccgtcatcaccgaaacgcgcgagacgaaagggcctcgtgatacgcctatttttataggttaatgtcatgacgcggaacccctatttgtttatttttctaaatacattcaaatatgtatccgctcatgagacaataaccctgataaatgcttcaataatattgaaaaaggaagagtatgagccatattcaacgggaaacgtcttgctctaggccgcgattaaattccaacatggatgctgatttatatgggtataaatgggctcgcgataatgtcgggcaatcaggtgcgacaatctatcgattgtatgggaagcccgatgcgccagagttgtttctgaaacatggcaaaggtagcgttgccaatgatgttacagatgagatggtcagactaaactggctgacggaatttatgcctcttccgaccatcaagcattttatccgtactcctgatgatgcatggttactcaccactgcgatccctgggaaaacagcattccaggtattagaagaatatcctgattcaggtgaaaatattgttgatgcgctggcagtgttcctgcgccggttgcattcgattcctgtttgtaattgtccttttaacagcgatcgcgtatttcgtctcgctcaggcgcaatcacgaatgaataacggtttggttgatgcgagtgattttgatgacgagcgtaatggctggcctgttgaacaagtctggaaagaaatgcataaacttttgccattctcaccggattcagtcgtcactcatggtgatttctcacttgataaccttatttttgacgaggggaaattaataggttgtattgatgttggacgagtcggaatcgcagaccgataccaggatcttgccatcctatggaactgcctcggtgagttttctccttcattacagaaacggctttttcaaaaatatggtattgataatcctgatatgaataaattgcagtttcatttgatgctcgatgagtttttctaatcatgaccaaaatcccttaacgtgagttttcgttccactgagcgtcagaccccgtagaaaagatcaaaggatcttcttgagatcctttttttctgcgcgtaatctgctgcttgcaaacaaaaaaaccaccgctaccagcggtggtttgtttgccggatcaagagctaccaactctttttccgaaggtaactggcttcagcagagcgcagataccaaatactgttcttctagtgtagccgtagttaggccaccacttcaagaactctgtagcaccgcctacatacctcgctctgctaatcctgttaccagtggctgctgccagtggcgataagtcgtgtcttaccgggttggactcaagacgatagttaccggataaggcgcagcggtcgggctgaacggggggttcgtgcacacagcccagcttggagcgaacgacctacaccgaactgagatacctacagcgtgagctatgagaaagcgccacgcttcccgaagggagaaaggcggacaggtatccggtaagcggcagggtcggaacaggagagcgcacgagggagcttccagggggaaacgcctggtatctttatagtcctgtcgggtttcgccacctctgacttgagcgtcgatttttgtgatgctcgtcaggggggcggagcctatggaaaaacgccagcaacgcggcctttttacggttcctggccttttgctggccttttgctcacatgt

SEQ ID NO: 101-199 - skipped (99 entries)

SEQ ID NO: 200 - DNA, 4589 bp, synthetic construct
  misc_feature 1..4589: note = AAV-CBA-hABCD1-WPRE, ITR-ITR Entire Construct
  source 1..4589: mol_type = other DNA
ttggccactccctctctgcgcgctcgctcgctcactgaggccgggcgaccaaaggtcgcccgacgcccgggctttgcccgggcggcctcagtgagcgagcgagcgcgcagagagggagtggccaactccatcactaggggttcctagatctgaattcggtaccctagttattaatagtaatcaattacggggtcattagttcatagcccatatatggagttccgcgttacataacttacggtaaatggcccgcctggctgaccgcccaacgacccccgcccattgacgtcaataatgacgtatgttcccatagtaacgccaatagggactttccattgacgtcaatgggtggactatttacggtaaactgcccacttggcagtacatcaagtgtatcatatgccaagtacgccccctattgacgtcaatgacggtaaatggcccgcctggcattatgcccagtacatgaccttatgggactttcctacttggcagtacatctacgtattagtcatcgctattaccatggtcgaggtgagccccacgttctgcttcactctccccatctcccccccctccccacccccaattttgtatttatttattttttaattattttgtgcagcgatgggggcggggggggggggggggcgcgcgccaggcggggcggggcggggcgaggggcggggcggggcgaggcggagaggtgcggcggcagccaatcagagcggcgcgctccgaaagtttccttttatggcgaggcggcggcggcggcggccctataaaaagcgaagcgcgcggcgggcgggagtcgctgcgacgctgccttcgccccgtgccccgctccgccgccgcctcgcgccgcccgccccggctctgactgaccgcgttactcccacaggtgagcgggcgggacggcccttctcctccgggctgtaattagcgcttggtttaatgacggcttgtttcttttctgtggctgcgtgaaagccttgaggggctccgggagctagagcctctgctaaccatgttcatgccttcttctttttcctacagctcctgggcaacgtgctggttattgtgctgtctcatcattttggcaaagaattcctcgaagatccgaaggggttcaagcttatgccggtgctctccaggccccggccctggcgggggaacacgctgaagcgcacggccgtgctcctggccctcgcggcctatggagcccacaaagtctaccccttggtgcgccagtgcctggccccggccaggggtcttcaggcgcccgccggggagcccacgcaggaggcctccggggtcgcggcggccaaagctggcatgaaccgggtattcctgcagcggctcctgtggctcctgcggctgctgttcccccgggtcctgtgccgggagacggggctgctggccctgcactcggccgccttggtgagccgcaccttcctgtcggtgtatgtggcccgcctggacggaaggctggcccgctgcatcgtccgcaaggacccgcgggcttttggctggcagctgctgcagtggctcctcatcgccctccctgctaccttcgtcaacagtgccatccgttacctggagggccaactggccctgtcgttccgcagccgtctggtggcccacgcctaccgcctctacttctcccagcagacctactaccgggtcagcaacatggacgggcggcttcgcaaccctgaccagtctctgacggaggacgtggtggcctttgcggcctctgtggcccacctctactccaacctgaccaagccactcctggacgtggctgtgacttcctacaccctgcttcgggcggcccgctcccgtggagccggcacagcctggccctcggccatcgccggcctcgtggtgttcctcacggccaacgtgctgcgggccttctcgcccaagttcggggagctggtggcagaggaggcgcggcggaagggggagctgcgctacatgcactcgcgtgtggtggccaactcggaggagatcgccttctatgggggccatgaggtggagctggccctgctacagcgctcctaccaggacctggcctcgcagatcaacctcatccttctggaacgcctgtggtatgttatgctggagcagttcctcatgaagtatgtgtggagcgcctcgggcctgctcatggtggctgtccccatcatcactgccactggctactcagagtcagatgcagaggccgtgaagaaggcagccttggaaaagaaggaggaggagctggtgagcgagcgcacagaagccttcactattgcccgcaacctcctgacagcggctgcagatgccattgagcggatcatgtcgtcgtacaaggaggtgacggagctggctggctacacagcccgggtgcacgagatgttccaggtatttgaagatgttcagcgctgtcacttcaagaggcccagggagctagaggacgctcaggcggggtctgggaccataggccggtctggtgtccgtgtggagggccccctgaagatccgaggccaggtggtggatgtggaacaggggatcatctgcgagaacatccccatcgtcacgccctcaggagaggtggtggtggccagcctcaacatcagggtggaggaaggcatgcatctgctcatcacaggccccaatggctgcggcaagagctccctgttccggatcctgggtgggctctggcccacgtacggtggtgtgctctacaagcccccaccccagcgcatgttctacatcccgcagaggccctacatgtctgtgggctccctgcgtgaccaggtgatctacccggactcagtggaggacatgcaaaggaagggctactcggagcaggacctggaagccatcctggacgtcgtgcacctgcaccacatcctgcagcgggagggaggttgggaggctatgtgtgactggaaggacgtcctgtcgggtggcgagaagcagagaatcggcatggcccgcatgttctaccacaggcccaagtacgccctcctggatgaatgcaccagcgccgtgagcatcgacgtggaaggcaagatcttccaggcggccaaggacgcgggcattgccctgctctccatcacccaccggccctccctgtggaaataccacacacacttgctacagttcgatggggagggcggctggaagttcgagaagctggactcagctgcccgcctgagcctgacggaggagaagcagcggctggagcagcagctggcgggcattcccaagatgcagcggcgcctccaggagctctgccagatcctgggcgaggccgtggccccagcgcatgtgccggcacctagcccgcaaggccctggtggcctccagggtgcctccacctgactcgagctagcggccgctctagaagataatcaacctctggattacaaaatttgtgaaagattgactggtattcttaactatgttgctccttttacgctatgtggatacgctgctttaatgcctttgtatcatgctattgcttcccgtatggctttcattttctcctccttgtataaatcctggttgctgtctctttatgaggagttgtggcccgttgtcaggcaacgtggcgtggtgtgcactgtgtttgctgacgcaacccccactggttggggcattgccaccacctgtcagctcctttccgggactttcgctttccccctccctattgccacggcggaactcatcgccgcctgccttgcccgctgctggacaggggctcggctgttgggcactgacaattccgtggtgttgtcggggaagctgacgtcctttccatggctgctcgcctgtgttgccacctggattctgcgcgggacgtccttctgctacgtcccttcggccctcaatccagcggaccttccttcccgcggcctgctgccggctctgcggcctcttccgcgtcttcgccttcgccctcagacgagtcggatctccctttgggccgcctccccgcatcggactagagagatccagacatgataagatacattgatgagtttggacaaaccacaactagaatgcagtgaaaaaaatgctttatttgtgaaatttgtgatgctattgctttatttgtaaccattataagctgcaataaacaagttaacaacaacaattgcattcattttatgtttcaggttcagggggaggtgtgggaggttttttagtcgactagagctcgctgatcagcctcgactgtgccttctagttgccagccatctgttgtttgcccctcccccgtgccttccttgaccctggaaggtgccactcccactgtcctttcctaataaaatgaggaaattgcatcgcattgtctgagtaggtgtcattctattctggggggtggggtggggcaggacagcaagggggaggattgggaagacaatagcaggcatgctggggagagatctaggaacccctagtgatggagttggccactccctctctgcgcgctcgctcgctcactgaggccgcccgggcaaagcccgggcgtcgggcgacctttggtcgcccggcctcagtgagcgagcgagcgcgcagagagggagtggcca

SEQ ID NO: 201 - DNA, 149 bp, synthetic construct
  misc_feature 1..149: note = AAV-CBA-hABCD1-WPRE, 5' ITR
  source 1..149: mol_type = other DNA
ttggccactccctctctgcgcgctcgctcgctcactgaggccgggcgaccaaaggtcgcccgacgcccgggctttgcccgggcggcctcagtgagcgagcgagcgcgcagagagggagtggccaactccatcactaggggttcctagat

SEQ ID NO: 202 - DNA, 139 bp, synthetic construct
  misc_feature 1..139: note = AAV-CBA-hABCD1-WPRE, 3' ITR
  source 1..139: mol_type = other DNA
cccctagtgatggagttggccactccctctctgcgcgctcgctcgctcactgaggccgcccgggcaaagcccgggcgtcgggcgacctttggtcgcccggcctcagtgagcgagcgagcgcgcagagagggagtggcca

SEQ ID NO: 203 - DNA, 983 bp, synthetic construct
  misc_feature 1..983: note = AAV-CBA-hABCD1-WPRE, Hybrid promoter (CMV immediate early enhancer, chicken beta-actin promoter, beta-actin exon, chimeric intron)
  source 1..983: mol_type = other DNA
ctgaattcggtaccctagttattaatagtaatcaattacggggtcattagttcatagcccatatatggagttccgcgttacataacttacggtaaatggcccgcctggctgaccgcccaacgacccccgcccattgacgtcaataatgacgtatgttcccatagtaacgccaatagggactttccattgacgtcaatgggtggactatttacggtaaactgcccacttggcagtacatcaagtgtatcatatgccaagtacgccccctattgacgtcaatgacggtaaatggcccgcctggcattatgcccagtacatgaccttatgggactttcctacttggcagtacatctacgtattagtcatcgctattaccatggtcgaggtgagccccacgttctgcttcactctccccatctcccccccctccccacccccaattttgtatttatttattttttaattattttgtgcagcgatgggggcggggggggggggggggcgcgcgccaggcggggcggggcggggcgaggggcggggcggggcgaggcggagaggtgcggcggcagccaatcagagcggcgcgctccgaaagtttccttttatggcgaggcggcggcggcggcggccctataaaaagcgaagcgcgcggcgggcgggagtcgctgcgacgctgccttcgccccgtgccccgctccgccgccgcctcgcgccgcccgccccggctctgactgaccgcgttactcccacaggtgagcgggcgggacggcccttctcctccgggctgtaattagcgcttggtttaatgacggcttgtttcttttctgtggctgcgtgaaagccttgaggggctccgggagctagagcctctgctaaccatgttcatgccttcttctttttcctacagctcctgggcaacgtgctggttattgtgctgtctcatcattttggcaaagaattcctcgaagatccgaaggggttca

SEQ ID NO: 204 - DNA, 2238 bp, synthetic construct
  misc_feature 1..2238: note = AAV-CBA-hABCD1-WPRE, hABCD1 cDNA
  source 1..2238: mol_type = other DNA
atgccggtgctctccaggccccggccctggcgggggaacacgctgaagcgcacggccgtgctcctggccctcgcggcctatggagcccacaaagtctaccccttggtgcgccagtgcctggccccggccaggggtcttcaggcgcccgccggggagcccacgcaggaggcctccggggtcgcggcggccaaagctggcatgaaccgggtattcctgcagcggctcctgtggctcctgcggctgctgttcccccgggtcctgtgccgggagacggggctgctggccctgcactcggccgccttggtgagccgcaccttcctgtcggtgtatgtggcccgcctggacggaaggctggcccgctgcatcgtccgcaaggacccgcgggcttttggctggcagctgctgcagtggctcctcatcgccctccctgctaccttcgtcaacagtgccatccgttacctggagggccaactggccctgtcgttccgcagccgtctggtggcccacgcctaccgcctctacttctcccagcagacctactaccgggtcagcaacatggacgggcggcttcgcaaccctgaccagtctctgacggaggacgtggtggcctttgcggcctctgtggcccacctctactccaacctgaccaagccactcctggacgtggctgtgacttcctacaccctgcttcgggcggcccgctcccgtggagccggcacagcctggccctcggccatcgccggcctcgtggtgttcctcacggccaacgtgctgcgggccttctcgcccaagttcggggagctggtggcagaggaggcgcggcggaagggggagctgcgctacatgcactcgcgtgtggtggccaactcggaggagatcgccttctatgggggccatgaggtggagctggccctgctacagcgctcctaccaggacctggcctcgcagatcaacctcatccttctggaacgcctgtggtatgttatgctggagcagttcctcatgaagtatgtgtggagcgcctcgggcctgctcatggtggctgtccccatcatcactgccactggctactcagagtcagatgcagaggccgtgaagaaggcagccttggaaaagaaggaggaggagctggtgagcgagcgcacagaagccttcactattgcccgcaacctcctgacagcggctgcagatgccattgagcggatcatgtcgtcgtacaaggaggtgacggagctggctggctacacagcccgggtgcacgagatgttccaggtatttgaagatgttcagcgctgtcacttcaagaggcccagggagctagaggacgctcaggcggggtctgggaccataggccggtctggtgtccgtgtggagggccccctgaagatccgaggccaggtggtggatgtggaacaggggatcatctgcgagaacatccccatcgtcacgccctcaggagaggtggtggtggccagcctcaacatcagggtggaggaaggcatgcatctgctcatcacaggccccaatggctgcggcaagagctccctgttccggatcctgggtgggctctggcccacgtacggtggtgtgctctacaagcccccaccccagcgcatgttctacatcccgcagaggccctacatgtctgtgggctccctgcgtgaccaggtgatctacccggactcagtggaggacatgcaaaggaagggctactcggagcaggacctggaagccatcctggacgtcgtgcacctgcaccacatcctgcagcgggagggaggttgggaggctatgtgtgactggaaggacgtcctgtcgggtggcgagaagcagagaatcggcatggcccgcatgttctaccacaggcccaagtacgccctcctggatgaatgcaccagcgccgtgagcatcgacgtggaaggcaagatcttccaggcggccaaggacgcgggcattgccctgctctccatcacccaccggccctccctgtggaaataccacacacacttgctacagttcgatggggagggcggctggaagttcgagaagctggactcagctgcccgcctgagcctgacggaggagaagcagcggctggagcagcagctggcgggcattcccaagatgcagcggcgcctccaggagctctgccagatcctgggcgaggccgtggccccagcgcatgtgccggcacctagcccgcaaggccctggtggcctccagggtgcctccacctga

SEQ ID NO: 205 - DNA, 602 bp, synthetic construct
  misc_feature 1..602: note = AAV-CBA-hABCD1-WPRE, WPRE
  source 1..602: mol_type = other DNA
gataatcaacctctggattacaaaatttgtgaaagattgactggtattcttaactatgttgctccttttacgctatgtggatacgctgctttaatgcctttgtatcatgctattgcttcccgtatggctttcattttctcctccttgtataaatcctggttgctgtctctttatgaggagttgtggcccgttgtcaggcaacgtggcgtggtgtgcactgtgtttgctgacgcaacccccactggttggggcattgccaccacctgtcagctcctttccgggactttcgctttccccctccctattgccacggcggaactcatcgccgcctgccttgcccgctgctggacaggggctcggctgttgggcactgacaattccgtggtgttgtcggggaagctgacgtcctttccatggctgctcgcctgtgttgccacctggattctgcgcgggacgtccttctgctacgtcccttcggccctcaatccagcggaccttccttcccgcggcctgctgccggctctgcggcctcttccgcgtcttcgccttcgccctcagacgagtcggatctccctttgggccgcctccccgcatcggactag

SEQ ID NO: 206 - DNA, 434 bp, synthetic construct
  misc_feature 1..434: note = AAV-CBA-hABCD1-WPRE, polyA (SV40 polyA and BGH polyA immediately following)
  source 1..434: mol_type = other DNA
gatccagacatgataagatacattgatgagtttggacaaaccacaactagaatgcagtgaaaaaaatgctttatttgtgaaatttgtgatgctattgctttatttgtaaccattataagctgcaataaacaagttaacaacaacaattgcattcattttatgtttcaggttcagggggaggtgtgggaggttttttagtcgactagagctcgctgatcagcctcgactgtgccttctagttgccagccatctgttgtttgcccctcccccgtgccttccttgaccctggaaggtgccactcccactgtcctttcctaataaaatgaggaaattgcatcgcattgtctgagtaggtgtcattctattctggggggtggggtggggcaggacagcaagggggaggattgggaagacaatagcaggcatgctgggga

SEQ ID NO: 207-299 - skipped (93 entries)

SEQ ID NO: 300 - DNA, 4589 bp, synthetic construct
  misc_feature 1..4589: note = AAV-CBA-hABCD1-WPREXinact, ITR-ITR Entire Construct
  source 1..4589: mol_type = other DNA
ttggccactccctctctgcgcgctcgctcgctcactgaggccgggcgaccaaaggtcgcccgacgcccgggctttgcccgggcggcctcagtgagcgagcgagcgcgcagagagggagtggccaactccatcactaggggttcctagatctgaattcggtaccctagttattaatagtaatcaattacggggtcattagttcatagcccatatatggagttccgcgttacataacttacggtaaatggcccgcctggctgaccgcccaacgacccccgcccattgacgtcaataatgacgtatgttcccatagtaacgccaatagggactttccattgacgtcaatgggtggactatttacggtaaactgcccacttggcagtacatcaagtgtatcatatgccaagtacgccccctattgacgtcaatgacggtaaatggcccgcctggcattatgcccagtacatgaccttatgggactttcctacttggcagtacatctacgtattagtcatcgctattaccatggtcgaggtgagccccacgttctgcttcactctccccatctcccccccctccccacccccaattttgtatttatttattttttaattattttgtgcagcgatgggggcggggggggggggggggcgcgcgccaggcggggcggggcggggcgaggggcggggcggggcgaggcggagaggtgcggcggcagccaatcagagcggcgcgctccgaaagtttccttttatggcgaggcggcggcggcggcggccctataaaaagcgaagcgcgcggcgggcgggagtcgctgcgacgctgccttcgccccgtgccccgctccgccgccgcctcgcgccgcccgccccggctctgactgaccgcgttactcccacaggtgagcgggcgggacggcccttctcctccgggctgtaattagcgcttggtttaatgacggcttgtttcttttctgtggctgcgtgaaagccttgaggggctccgggagctagagcctctgctaaccatgttcatgccttcttctttttcctacagctcctgggcaacgtgctggttattgtgctgtctcatcattttggcaaagaattcctcgaagatccgaaggggttcaagcttatgccggtgctctccaggccccggccctggcgggggaacacgctgaagcgcacggccgtgctcctggccctcgcggcctatggagcccacaaagtctaccccttggtgcgccagtgcctggccccggccaggggtcttcaggcgcccgccggggagcccacgcaggaggcctccggggtcgcggcggccaaagctggcatgaaccgggtattcctgcagcggctcctgtggctcctgcggctgctgttcccccgggtcctgtgccgggagacggggctgctggccctgcactcggccgccttggtgagccgcaccttcctgtcggtgtatgtggcccgcctggacggaaggctggcccgctgcatcgtccgcaaggacccgcgggcttttggctggcagctgctgcagtggctcctcatcgccctccctgctaccttcgtcaacagtgccatccgttacctggagggccaactggccctgtcgttccgcagccgtctggtggcccacgcctaccgcctctacttctcccagcagacctactaccgggtcagcaacatggacgggcggcttcgcaaccctgaccagtctctgacggaggacgtggtggcctttgcggcctctgtggcccacctctactccaacctgaccaagccactcctggacgtggctgtgacttcctacaccctgcttcgggcggcccgctcccgtggagccggcacagcctggccctcggccatcgccggcctcgtggtgttcctcacggccaacgtgctgcgggccttctcgcccaagttcggggagctggtggcagaggaggcgcggcggaagggggagctgcgctacatgcactcgcgtgtggtggccaactcggaggagatcgccttctatgggggccatgaggtggagctggccctgctacagcgctcctaccaggacctggcctcgcagatcaacctcatccttctggaacgcctgtggtatgttatgctggagcagttcctcatgaagtatgtgtggagcgcctcgggcctgctcatggtggctgtccccatcatcactgccactggctactcagagtcagatgcagaggccgtgaagaaggcagccttggaaaagaaggaggaggagctggtgagcgagcgcacagaagccttcactattgcccgcaacctcctgacagcggctgcagatgccattgagcggatcatgtcgtcgtacaaggaggtgacggagctggctggctacacagcccgggtgcacgagatgttccaggtatttgaagatgttcagcgctgtcacttcaagaggcccagggagctagaggacgctcaggcggggtctgggaccataggccggtctggtgtccgtgtggagggccccctgaagatccgaggccaggtggtggatgtggaacaggggatcatctgcgagaacatccccatcgtcacgccctcaggagaggtggtggtggccagcctcaacatcagggtggaggaaggcatgcatctgctcatcacaggccccaatggctgcggcaagagctccctgttccggatcctgggtgggctctggcccacgtacggtggtgtgctctacaagcccccaccccagcgcatgttctacatcccgcagaggccctacatgtctgtgggctccctgcgtgaccaggtgatctacccggactcagtggaggacatgcaaaggaagggctactcggagcaggacctggaagccatcctggacgtcgtgcacctgcaccacatcctgcagcgggagggaggttgggaggctatgtgtgactggaaggacgtcctgtcgggtggcgagaagcagagaatcggcatggcccgcatgttctaccacaggcccaagtacgccctcctggatgaatgcaccagcgccgtgagcatcgacgtggaaggcaagatcttccaggcggccaaggacgcgggcattgccctgctctccatcacccaccggccctccctgtggaaataccacacacacttgctacagttcgatggggagggcggctggaagttcgagaagctggactcagctgcccgcctgagcctgacggaggagaagcagcggctggagcagcagctggcgggcattcccaagatgcagcggcgcctccaggagctctgccagatcctgggcgaggccgtggccccagcgcatgtgccggcacctagcccgcaaggccctggtggcctccagggtgcctccacctgactcgagctagcggccgctctagaagataatcaacctctggattacaaaatttgtgaaagattgactggtattcttaactatgttgctccttttacgctatgtggatacgctgctttaatgcctttgtatcatgctattgcttcccgtatggctttcattttctcctccttgtataaatcctggttgctgtctctttatgaggagttgtggcccgttgtcaggcaacgtggcgtggtgtgcactgtgtttgctgacgcaacccccactggttggggcattgccaccacctgtcagctcctttccgggactttcgctttccccctccctattgccacggcggaactcatcgccgcctgccttgcccgctgctggacaggggctcggctgttgggcactgacaattccgtggtgttgtcggggaaatcatcgtcctttccttggctgctcgcctgtgttgccacctggattctgcgcgggacgtccttctgctacgtcccttcggccctcaatccagcggaccttccttcccgcggcctgctgccggctctgcggcctcttccgcgtcttcgccttcgccctcagacgagtcggatctccctttgggccgcctccccgcatcggactagagagatccagacatgataagatacattgatgagtttggacaaaccacaactagaatgcagtgaaaaaaatgctttatttgtgaaatttgtgatgctattgctttatttgtaaccattataagctgcaataaacaagttaacaacaacaattgcattcattttatgtttcaggttcagggggaggtgtgggaggttttttagtcgactagagctcgctgatcagcctcgactgtgccttctagttgccagccatctgttgtttgcccctcccccgtgccttccttgaccctggaaggtgccactcccactgtcctttcctaataaaatgaggaaattgcatcgcattgtctgagtaggtgtcattctattctggggggtggggtggggcaggacagcaagggggaggattgggaagacaatagcaggcatgctggggagagatctaggaacccctagtgatggagttggccactccctctctgcgcgctcgctcgctcactgaggccgcccgggcaaagcccgggcgtcgggcgacctttggtcgcccggcctcagtgagcgagcgagcgcgcagagagggagtggcca

SEQ ID NO: 301 - DNA, 149 bp, synthetic construct; identical to SEQ ID NO: 201
  misc_feature 1..149: note = AAV-CBA-hABCD1-WPREXinact, 5' ITR (alternative definition)
  source 1..149: mol_type = other DNA

SEQ ID NO: 302 - DNA, 139 bp, synthetic construct; identical to SEQ ID NO: 202
  misc_feature 1..139: note = AAV-CBA-hABCD1-WPREXinact, 3' ITR (alternative definition)
  source 1..139: mol_type = other DNA

SEQ ID NO: 303 - DNA, 983 bp, synthetic construct; identical to SEQ ID NO: 203
  misc_feature 1..983: note = AAV-CBA-hABCD1-WPREXinact, Hybrid promoter (CMV immediate early enhancer, chicken beta-actin promoter, beta-actin exon, chimeric intron)
  source 1..983: mol_type = other DNA

SEQ ID NO: 304 - DNA, 2238 bp, synthetic construct; identical to SEQ ID NO: 204
  misc_feature 1..2238: note = AAV-CBA-hABCD1-WPREXinact, hABCD1 cDNA
  source 1..2238: mol_type = other DNA

SEQ ID NO: 305 - DNA, 601 bp, synthetic construct
  misc_feature 1..601: note = AAV-CBA-hABCD1-WPREXinact, WPRE (X inact) (SEQ ID NO: 305)
  source 1..601: mol_type = other DNA
gataatcaacctctggattacaaaatttgtgaaagattgactggtattcttaactatgttgctccttttacgctatgtggatacgctgctttaatgcctttgtatcatgctattgcttcccgtatggctttcattttctcctccttgtataaatcctggttgctgtctctttatgaggagttgtggcccgttgtcaggcaacgtggcgtggtgtgcactgtgtttgctgacgcaacccccactggttggggcattgccaccacctgtcagctcctttccgggactttcgctttccccctccctattgccacggcggaactcatcgccgcctgccttgcccgctgctggacaggggctcggctgttgggcactgacaattccgtggtgttgtcggggaaatcatcgtcctttccttggctgctcgcctgtgttgccacctggattctgcgcgggacgtccttctgctacgtcccttcggccctcaatccagcggaccttccttcccgcggcctgctgccggctctgcggcctcttccgcgtcttcgccttcgccctcagacgagtcggatctccctttgggccgcctccccgcatcggacta

SEQ ID NO: 306 - DNA, 434 bp, synthetic construct; identical to SEQ ID NO: 206
  misc_feature 1..434: note = AAV-CBA-hABCD1-WPREXinact, polyA (SV40 polyA and BGH polyA immediately following)
  source 1..434: mol_type = other DNA

SEQ ID NO: 307-399 - skipped (93 entries)

SEQ ID NO: 400 - DNA, 3982 bp, synthetic construct
  misc_feature 1..3982: note = AAV-CBA-hABCD1 [no WPRE], 5' ITR - 3'ITR Entire Construct
  source 1..3982: mol_type = other DNA
ttggccactccctctctgcgcgctcgctcgctcactgaggccgggcgaccaaaggtcgcccgacgcccgggctttgcccgggcggcctcagtgagcgagcgagcgcgcagagagggagtggccaactccatcactaggggttcctagatctgaattcggtaccctagttattaatagtaatcaattacggggtcattagttcatagcccatatatggagttccgcgttacataacttacggtaaatggcccgcctggctgaccgcccaacgacccccgcccattgacgtcaataatgacgtatgttcccatagtaacgccaatagggactttccattgacgtcaatgggtggactatttacggtaaactgcccacttggcagtacatcaagtgtatcatatgccaagtacgccccctattgacgtcaatgacggtaaatggcccgcctggcattatgcccagtacatgaccttatgggactttcctacttggcagtacatctacgtattagtcatcgctattaccatggtcgaggtgagccccacgttctgcttcactctccccatctcccccccctccccacccccaattttgtatttatttattttttaattattttgtgcagcgatgggggcggggggggggggggggcgcgcgccaggcggggcggggcggggcgaggggcggggcggggcgaggcggagaggtgcggcggcagccaatcagagcggcgcgctccgaaagtttccttttatggcgaggcggcggcggcggcggccctataaaaagcgaagcgcgcggcgggcgggagtcgctgcgacgctgccttcgccccgtgccccgctccgccgccgcctcgcgccgcccgccccggctctgactgaccgcgttactcccacaggtgagcgggcgggacggcccttctcctccgggctgtaattagcgcttggtttaatgacggcttgtttcttttctgtggctgcgtgaaagccttgaggggctccgggagctagagcctctgctaaccatgttcatgccttcttctttttcctacagctcctgggcaacgtgctggttattgtgctgtctcatcattttggcaaagaattcctcgaagatccgaaggggttcaatgccggtgctctccaggccccggccctggcgggggaacacgctgaagcgcacggccgtgctcctggccctcgcggcctatggagcccacaaagtctaccccttggtgcgccagtgcctggccccggccaggggtcttcaggcgcccgccggggagcccacgcaggaggcctccggggtcgcggcggccaaagctggcatgaaccgggtattcctgcagcggctcctgtggctcctgcggctgctgttcccccgggtcctgtgccgggagacggggctgctggccctgcactcggccgccttggtgagccgcaccttcctgtcggtgtatgtggcccgcctggacggaaggctggcccgctgcatcgtccgcaaggacccgcgggcttttggctggcagctgctgcagtggctcctcatcgccctccctgctaccttcgtcaacagtgccatccgttacctggagggccaactggccctgtcgttccgcagccgtctggtggcccacgcctaccgcctctacttctcccagcagacctactaccgggtcagcaacatggacgggcggcttcgcaaccctgaccagtctctgacggaggacgtggtggcctttgcggcctctgtggcccacctctactccaacctgaccaagccactcctggacgtggctgtgacttcctacaccctgcttcgggcggcccgctcccgtggagccggcacagcctggccctcggccatcgccggcctcgtggtgttcctcacggccaacgtgctgcgggccttctcgcccaagttcggggagctggtggcagaggaggcgcggcggaagggggagctgcgctacatgcactcgcgtgtggtggccaactcggaggagatcgccttctatgggggccatgaggtggagctggccctgctacagcgctcctaccaggacctggcctcgcagatcaacctcatccttctggaacgcctgtggtatgttatgctggagcagttcctcatgaagtatgtgtggagcgcctcgggcctgctcatggtggctgtccccatcatcactgccactggctactcagagtcagatgcagaggccgtgaagaaggcagccttggaaaagaaggaggaggagctggtgagcgagcgcacagaagccttcactattgcccgcaacctcctgacagcggctgcagatgccattgagcggatcatgtcgtcgtacaaggaggtgacggagctggctggctacacagcccgggtgcacgagatgttccaggtatttgaagatgttcagcgctgtcacttcaagaggcccagggagctagaggacgctcaggcggggtctgggaccataggccggtctggtgtccgtgtggagggccccctgaagatccgaggccaggtggtggatgtggaacaggggatcatctgcgagaacatccccatcgtcacgccctcaggagaggtggtggtggccagcctcaacatcagggtggaggaaggcatgcatctgctcatcacaggccccaatggctgcggcaagagctccctgttccggatcctgggtgggctctggcccacgtacggtggtgtgctctacaagcccccaccccagcgcatgttctacatcccgcagaggccctacatgtctgtgggctccctgcgtgaccaggtgatctacccggactcagtggaggacatgcaaaggaagggctactcggagcaggacctggaagccatcctggacgtcgtgcacctgcaccacatcctgcagcgggagggaggttgggaggctatgtgtgactggaaggacgtcctgtcgggtggcgagaagcagagaatcggcatggcccgcatgttctaccacaggcccaagtacgccctcctggatgaatgcaccagcgccgtgagcatcgacgtggaaggcaagatcttccaggcggccaaggacgcgggcattgccctgctctccatcacccaccggccctccctgtggaaataccacacacacttgctacagttcgatggggagggcggctggaagttcgagaagctggactcagctgcccgcctgagcctgacggaggagaagcagcggctggagcagcagctggcgggcattcccaagatgcagcggcgcctccaggagctctgccagatcctgggcgaggccgtggccccagcgcatgtgccggcacctagcccgcaaggccctggtggcctccagggtgcctccacctgactcgagctagcggccgctctagaaagagatccagacatgataagatacattgatgagtttggacaaaccacaactagaatgcagtgaaaaaaatgctttatttgtgaaatttgtgatgctattgctttatttgtaaccattataagctgcaataaacaagttaacaacaacaattgcattcattttatgtttcaggttcagggggaggtgtgggaggttttttagtcgactagagctcgctgatcagcctcgactgtgccttctagttgccagccatctgttgtttgcccctcccccgtgccttccttgaccctggaaggtgccactcccactgtcctttcctaataaaatgaggaaattgcatcgcattgtctgagtaggtgtcattctattctggggggtggggtggggcaggacagcaagggggaggattgggaagacaatagcaggcatgctggggagagatctaggaacccctagtgatggagttggccactccctctctgcgcgctcgctcgctcactgaggccgcccgggcaaagcccgggcgtcgggcgacctttggtcgcccggcctcagtgagcgagcgagcgcgcagagagggagtggcca

SEQ ID NO: 401 - DNA, 149 bp, synthetic construct; identical to SEQ ID NO: 201
  misc_feature 1..149: note = AAV-CBA-hABCD1, 5' ITR (alternative definition)
  source 1..149: mol_type = other DNA

SEQ ID NO: 402 - DNA, 139 bp, synthetic construct; identical to SEQ ID NO: 202
  misc_feature 1..139: note = AAV-CBA-hABCD1, 3' ITR (alternative definition)
  source 1..139: mol_type = other DNA

SEQ ID NO: 403 - DNA, 983 bp, synthetic construct; identical to SEQ ID NO: 203
  misc_feature 1..983: note = AAV-CBA-hABCD1, Hybrid promoter (CMV immediate early enhancer, chicken beta-actin promoter, beta-actin exon, chimeric intron)
  source 1..983: mol_type = other DNA

SEQ ID NO: 404 - DNA, 2238 bp, synthetic construct; identical to SEQ ID NO: 204
  misc_feature 1..2238: note = AAV-CBA-hABCD1, hABCD1 cDNA
  source 1..2238: mol_type = other DNA

SEQ ID NO: 405 - DNA, 434 bp, synthetic construct; identical to SEQ ID NO: 206
  misc_feature 1..434: note = AAV-CBA-hABCD1, polyA (SV40 polyA and BGH polyA immediately following)
  source 1..434: mol_type = other DNA

SEQ ID NO: 406-500 - skipped (95 entries)

SEQ ID NO: 501 - DNA, 2235 bp, synthetic construct
  misc_feature 1..2235: note = Exemplary ABCD1 coding sequence 01
  source 1..2235: mol_type = other DNA
atgcccgtgctgagcagacccagaccctggagaggcaacaccctgaagagaaccgccgtgctgctggccctggccgcctacggcgcccacaaggtgtaccccctggtgagacagtgcctggcccccgccagaggcctgcaggcccccgccggcgagcccacccaggaggccagcggcgtggccgccgccaaggccggcatgaacagagtgttcctgcagagactgctgtggctgctgagactgctgttccccagagtgctgtgcagagagaccggcctgctggccctgcacagcgccgccctggtgagcagaaccttcctgagcgtgtacgtggccagactggacggcagactggccagatgcatcgtgagaaaggaccccagagccttcggctggcagctgctgcagtggctgctgatcgccctgcccgccaccttcgtgaacagcgccatcagatacctggagggccagctggccctgagcttcagaagcagactggtggcccacgcctacagactgtacttcagccagcagacctactacagagtgagcaacatggacggcagactgagaaaccccgaccagagcctgaccgaggacgtggtggccttcgccgccagcgtggcccacctgtacagcaacctgaccaagcccctgctggacgtggccgtgaccagctacaccctgctgagagccgccagaagcagaggcgccggcaccgcctggcccagcgccatcgccggcctggtggtgttcctgaccgccaacgtgctgagagccttcagccccaagttcggcgagctggtggccgaggaggccagaagaaagggcgagctgagatacatgcacagcagagtggtggccaacagcgaggagatcgccttctacggcggccacgaggtggagctggccctgctgcagagaagctaccaggacctggccagccagatcaacctgatcctgctggagagactgtggtacgtgatgctggagcagttcctgatgaagtacgtgtggagcgccagcggcctgctgatggtggccgtgcccatcatcaccgccaccggctacagcgagagcgacgccgaggccgtgaagaaggccgccctggagaagaaggaggaggagctggtgagcgagagaaccgaggccttcaccatcgccagaaacctgctgaccgccgccgccgacgccatcgagagaatcatgagcagctacaaggaggtgaccgagctggccggctacaccgccagagtgcacgagatgttccaggtgttcgaggacgtgcagagatgccacttcaagagacccagagagctggaggacgcccaggccggcagcggcaccatcggcagaagcggcgtgagagtggagggccccctgaagatcagaggccaggtggtggacgtggagcagggcatcatctgcgagaacatccccatcgtgacccccagcggcgaggtggtggtggccagcctgaacatcagagtggaggagggcatgcacctgctgatcaccggccccaacggctgcggcaagagcagcctgttcagaatcctgggcggcctgtggcccacctacggcggcgtgctgtacaagccccccccccagagaatgttctacatcccccagagaccctacatgagcgtgggcagcctgagagaccaggtgatctaccccgacagcgtggaggacatgcagagaaagggctacagcgagcaggacctggaggccatcctggacgtggtgcacctgcaccacatcctgcagagagagggcggctgggaggccatgtgcgactggaaggacgtgctgagcggcggcgagaagcagagaatcggcatggccagaatgttctaccacagacccaagtacgccctgctggacgagtgcaccagcgccgtgagcatcgacgtggagggcaagatcttccaggccgccaaggacgccggcatcgccctgctgagcatcacccacagacccagcctgtggaagtaccacacccacctgctgcagttcgacggcgagggcggctggaagttcgagaagctggacagcgccgccagactgagcctgaccgaggagaagcagagactggagcagcagctggccggcatccccaagatgcagagaagactgcaggagctgtgccagatcctgggcgaggccgtggcccccgcccacgtgcccgcccccagcccccagggccccggcggcctgcagggcgccagcacc

SEQ ID NO: 502 - DNA, 2235 bp, synthetic construct
  misc_feature 1..2235: note = Exemplary ABCD1 coding sequence 02
  source 1..2235: mol_type = other DNA
atgcccgtgctgagcaggcccaggccctggaggggcaacaccctgaagaggaccgccgtgctgctggccctggccgcctacggcgcccacaaggtgtaccccctggtgaggcagtgcctggcccccgccaggggcctgcaggcccccgccggcgagcccacccaggaggccagcggcgtggccgccgccaaggccggcatgaacagggtgttcctgcagaggctgctgtggctgctgaggctgctgttccccagggtgctgtgcagggagaccggcctgctggccctgcacagcgccgccctggtgagcaggaccttcctgagcgtgtacgtggccaggctggacggcaggctggccaggtgcatcgtgaggaaggaccccagggccttcggctggcagctgctgcagtggctgctgatcgccctgcccgccaccttcgtgaacagcgccatcaggtacctggagggccagctggccctgagcttcaggagcaggctggtggcccacgcctacaggctgtacttcagccagcagacctactacagggtgagcaacatggacggcaggctgaggaaccccgaccagagcctgaccgaggacgtggtggccttcgccgccagcgtggcccacctgtacagcaacctgaccaagcccctgctggacgtggccgtgaccagctacaccctgctgagggccgccaggagcaggggcgccggcaccgcctggcccagcgccatcgccggcctggtggtgttcctgaccgccaacgtgctgagggccttcagccccaagttcggcgagctggtggccgaggaggccaggaggaagggcgagctgaggtacatgcacagcagggtggtggccaacagcgaggagatcgccttctacggcggccacgaggtggagctggccctgctgcagaggagctaccaggacctggccagccagatcaacctgatcctgctggagaggctgtggtacgtgatgctggagcagttcctgatgaagtacgtgtggagcgccagcggcctgctgatggtggccgtgcccatcatcaccgccaccggctacagcgagagcgacgccgaggccgtgaagaaggccgccctggagaagaaggaggaggagctggtgagcgagaggaccgaggccttcaccatcgccaggaacctgctgaccgccgccgccgacgccatcgagaggatcatgagcagctacaaggaggtgaccgagctggccggctacaccgccagggtgcacgagatgttccaggtgttcgaggacgtgcagaggtgccacttcaagaggcccagggagctggaggacgcccaggccggcagcggcaccatcggcaggagcggcgtgagggtggagggccccctgaagatcaggggccaggtggtggacgtggagcagggcatcatctgcgagaacatccccatcgtgacccccagcggcgaggtggtggtggccagcctgaacatcagggtggaggagggcatgcacctgctgatcaccggccccaacggctgcggcaagagcagcctgttcaggatcctgggcggcctgtggcccacctacggcggcgtgctgtacaagccccccccccagaggatgttctacatcccccagaggccctacatgagcgtgggcagcctgagggaccaggtgatctaccccgacagcgtggaggacatgcagaggaagggctacagcgagcaggacctggaggccatcctggacgtggtgcacctgcaccacatcctgcagagggagggcggctgggaggccatgtgcgactggaaggacgtgctgagcggcggcgagaagcagaggatcggcatggccaggatgttctaccacaggcccaagtacgccctgctggacgagtgcaccagcgccgtgagcatcgacgtggagggcaagatcttccaggccgccaaggacgccggcatcgccctgctgagcatcacccacaggcccagcctgtggaagtaccacacccacctgctgcagttcgacggcgagggcggctggaagttcgagaagctggacagcgccgccaggctgagcctgaccgaggagaagcagaggctggagcagcagctggccggcatccccaagatgcagaggaggctgcaggagctgtgccagatcctgggcgaggccgtggcccccgcccacgtgcccgcccccagcccccagggccccggcggcctgcagggcgccagcacc

SEQ ID NO: 503 - DNA, 2235 bp, synthetic construct
  misc_feature 1..2235: note = Exemplary ABCD1 coding sequence 03
  source 1..2235: mol_type = other DNA
atgccagtgttatctcgtccacgtccatggcgtggtaatactttaaaacgtactgcagtgttattagcattagcagcatatggtgcacataaagtgtatccattagtgcgtcaatgtttagcaccagcacgtggtttacaagcaccagcaggtgaaccaactcaagaagcatctggtgtggcagcagcaaaagcaggtatgaatcgtgtgtttttacaacgtttattatggttattacgtttattatttccacgtgtgttatgtcgtgaaactggtttattagcattacattctgcagcattagtgtctcgtacttttttatctgtgtatgtggcacgtttagatggtcgtttagcacgttgtattgtgcgtaaagatccacgtgcatttggttggcaattattacaatggttattaattgcattaccagcaacttttgtgaattctgcaattcgttatttagaaggtcaattagcattatcttttcgttctcgtttagtggcacatgcatatcgtttatatttttctcaacaaacttattatcgtgtgtctaatatggatggtcgtttacgtaatccagatcaatctttaactgaagatgtggtggcatttgcagcatctgtggcacatttatattctaatttaactaaaccattattagatgtggcagtgacttcttatactttattacgtgcagcacgttctcgtggtgcaggtactgcatggccatctgcaattgcaggtttagtggtgtttttaactgcaaatgtgttacgtgcattttctccaaaatttggtgaattagtggcagaagaagcacgtcgtaaaggtgaattacgttatatgcattctcgtgtggtggcaaattctgaagaaattgcattttatggtggtcatgaagtggaattagcattattacaacgttcttatcaagatttagcatctcaaattaatttaattttattagaacgtttatggtatgtgatgttagaacaatttttaatgaaatatgtgtggtctgcatctggtttattaatggtggcagtgccaattattactgcaactggttattctgaatctgatgcagaagcagtgaaaaaagcagcattagaaaaaaaagaagaagaattagtgtctgaacgtactgaagcatttactattgcacgtaatttattaactgcagcagcagatgcaattgaacgtattatgtcttcttataaagaagtgactgaattagcaggttatactgcacgtgtgcatgaaatgtttcaagtgtttgaagatgtgcaacgttgtcattttaaacgtccacgtgaattagaagatgcacaagcaggttctggtactattggtcgttctggtgtgcgtgtggaaggtccattaaaaattcgtggtcaagtggtggatgtggaacaaggtattatttgtgaaaatattccaattgtgactccatctggtgaagtggtggtggcatctttaaatattcgtgtggaagaaggtatgcatttattaattactggtccaaatggttgtggtaaatcttctttatttcgtattttaggtggtttatggccaacttatggtggtgtgttatataaaccaccaccacaacgtatgttttatattccacaacgtccatatatgtctgtgggttctttacgtgatcaagtgatttatccagattctgtggaagatatgcaacgtaaaggttattctgaacaagatttagaagcaattttagatgtggtgcatttacatcatattttacaacgtgaaggtggttgggaagcaatgtgtgattggaaagatgtgttatctggtggtgaaaaacaacgtattggtatggcacgtatgttttatcatcgtccaaaatatgcattattagatgaatgtacttctgcagtgtctattgatgtggaaggtaaaatttttcaagcagcaaaagatgcaggtattgcattattatctattactcatcgtccatctttatggaaatatcatactcatttattacaatttgatggtgaaggtggttggaaatttgaaaaattagattctgcagcacgtttatctttaactgaagaaaaacaacgtttagaacaacaattagcaggtattccaaaaatgcaacgtcgtttacaagaattatgtcaaattttaggtgaagcagtggcaccagcacatgtgccagcaccatctccacaaggtccaggtggtttacaaggtgcatctact

SEQ ID NO: 504 - DNA, 2235 bp, synthetic construct
  misc_feature 1..2235: note = Exemplary ABCD1 coding sequence 04
  source 1..2235: mol_type = other DNA
atgcccgtgctgtcccgcccccgcccctggcgcggcaacaccctgaagcgcaccgccgtgctgctggccctggccgcctacggcgcccacaaggtgtaccccctggtgcgccagtgcctggcccccgcccgcggcctgcaggcccccgccggcgagcccacccaggaggcctccggcgtggccgccgccaaggccggcatgaaccgcgtgttcctgcagcgcctgctgtggctgctgcgcctgctgttcccccgcgtgctgtgccgcgagaccggcctgctggccctgcactccgccgccctggtgtcccgcaccttcctgtccgtgtacgtggcccgcctggacggccgcctggcccgctgcatcgtgcgcaaggacccccgcgccttcggctggcagctgctgcagtggctgctgatcgccctgcccgccaccttcgtgaactccgccatccgctacctggagggccagctggccctgtccttccgctcccgcctggtggcccacgcctaccgcctgtacttctcccagcagacctactaccgcgtgtccaacatggacggccgcctgcgcaaccccgaccagtccctgaccgaggacgtggtggccttcgccgcctccgtggcccacctgtactccaacctgaccaagcccctgctggacgtggccgtgacctcctacaccctgctgcgcgccgcccgctcccgcggcgccggcaccgcctggccctccgccatcgccggcctggtggtgttcctgaccgccaacgtgctgcgcgccttctcccccaagttcggcgagctggtggccgaggaggcccgccgcaagggcgagctgcgctacatgcactcccgcgtggtggccaactccgaggagatcgccttctacggcggccacgaggtggagctggccctgctgcagcgctcctaccaggacctggcctcccagatcaacctgatcctgctggagcgcctgtggtacgtgatgctggagcagttcctgatgaagtacgtgtggtccgcctccggcctgctgatggtggccgtgcccatcatcaccgccaccggctactccgagtccgacgccgaggccgtgaagaaggccgccctggagaagaaggaggaggagctggtgtccgagcgcaccgaggccttcaccatcgcccgcaacctgctgaccgccgccgccgacgccatcgagcgcatcatgtcctcctacaaggaggtgaccgagctggccggctacaccgcccgcgtgcacgagatgttccaggtgttcgaggacgtgcagcgctgccacttcaagcgcccccgcgagctggaggacgcccaggccggctccggcaccatcggccgctccggcgtgcgcgtggagggccccctgaagatccgcggccaggtggtggacgtggagcagggcatcatctgcgagaacatccccatcgtgaccccctccggcgaggtggtggtggcctccctgaacatccgcgtggaggagggcatgcacctgctgatcaccggccccaacggctgcggcaagtcctccctgttccgcatcctgggcggcctgtggcccacctacggcggcgtgctgtacaagccccccccccagcgcatgttctacatcccccagcgcccctacatgtccgtgggctccctgcgcgaccaggtgatctaccccgactccgtggaggacatgcagcgcaagggctactccgagcaggacctggaggccatcctggacgtggtgcacctgcaccacatcctgcagcgcgagggcggctgggaggccatgtgcgactggaaggacgtgctgtccggcggcgagaagcagcgcatcggcatggcccgcatgttctaccaccgccccaagtacgccctgctggacgagtgcacctccgccgtgtccatcgacgtggagggcaagatcttccaggccgccaaggacgccggcatcgccctgctgtccatcacccaccgcccctccctgtggaagtaccacacccacctgctgcagttcgacggcgagggcggctggaagttcgagaagctggactccgccgcccgcctgtccctgaccgaggagaagcagcgcctggagcagcagctggccggcatccccaagatgcagcgccgcctgcaggagctgtgccagatcctgggcgaggccgtggcccccgcccacgtgcccgccccctccccccagggccccggcggcctgcagggcgcctccacc

SEQ ID NO: 505 - DNA, 2235 bp, synthetic construct; identical to SEQ ID NO: 502
  misc_feature 1..2235: note = Exemplary ABCD1 coding sequence 05
  source 1..2235: mol_type = other DNA

SEQ ID NO: 506 - DNA, 2235 bp, synthetic construct
  misc_feature 1..2235: note = Exemplary ABCD1 coding sequence 06
  source 1..2235: mol_type = other DNA
atgccagtgctgagcagaccaagaccatggagaggcaataccctgaagagaaccgccgtgctgctggccctggccgcctacggcgcccacaaggtgtacccactggtgagacagtgcctggccccagccagaggcctgcaggccccagccggcgagccaacccaggaggccagcggcgtggccgccgccaaggccggcatgaatagagtgtttctgcagagactgctgtggctgctgagactgctgtttccaagagtgctgtgcagagagaccggcctgctggccctgcacagcgccgccctggtgagcagaacctttctgagcgtgtacgtggccagactggacggcagactggccagatgcatcgtgagaaaggacccaagagcctttggctggcagctgctgcagtggctgctgatcgccctgccagccacctttgtgaatagcgccatcagatacctggagggccagctggccctgagctttagaagcagactggtggcccacgcctacagactgtactttagccagcagacctactacagagtgagcaatatggacggcagactgagaaatccagaccagagcctgaccgaggacgtggtggcctttgccgccagcgtggcccacctgtacagcaatctgaccaagccactgctggacgtggccgtgaccagctacaccctgctgagagccgccagaagcagaggcgccggcaccgcctggccaagcgccatcgccggcctggtggtgtttctgaccgccaatgtgctgagagcctttagcccaaagtttggcgagctggtggccgaggaggccagaagaaagggcgagctgagatacatgcacagcagagtggtggccaatagcgaggagatcgccttttacggcggccacgaggtggagctggccctgctgcagagaagctaccaggacctggccagccagatcaatctgatcctgctggagagactgtggtacgtgatgctggagcagtttctgatgaagtacgtgtggagcgccagcggcctgctgatggtggccgtgccaatcatcaccgccaccggctacagcgagagcgacgccgaggccgtgaagaaggccgccctggagaagaaggaggaggagctggtgagcgagagaaccgaggcctttaccatcgccagaaatctgctgaccgccgccgccgacgccatcgagagaatcatgagcagctacaaggaggtgaccgagctggccggctacaccgccagagtgcacgagatgtttcaggtgtttgaggacgtgcagagatgccactttaagagaccaagagagctggaggacgcccaggccggcagcggcaccatcggcagaagcggcgtgagagtggagggcccactgaagatcagaggccaggtggtggacgtggagcagggcatcatctgcgagaatatcccaatcgtgaccccaagcggcgaggtggtggtggccagcctgaatatcagagtggaggagggcatgcacctgctgatcaccggcccaaatggctgcggcaagagcagcctgtttagaatcctgggcggcctgtggccaacctacggcggcgtgctgtacaagccaccaccacagagaatgttttacatcccacagagaccatacatgagcgtgggcagcctgagagaccaggtgatctacccagacagcgtggaggacatgcagagaaagggctacagcgagcaggacctggaggccatcctggacgtggtgcacctgcaccacatcctgcagagagagggcggctgggaggccatgtgcgactggaaggacgtgctgagcggcggcgagaagcagagaatcggcatggccagaatgttttaccacagaccaaagtacgccctgctggacgagtgcaccagcgccgtgagcatcgacgtggagggcaagatctttcaggccgccaaggacgccggcatcgccctgctgagcatcacccacagaccaagcctgtggaagtaccacacccacctgctgcagtttgacggcgagggcggctggaagtttgagaagctggacagcgccgccagactgagcctgaccgaggagaagcagagactggagcagcagctggccggcatcccaaagatgcagagaagactgcaggagctgtgccagatcctgggcgaggccgtggccccagcccacgtgccagccccaagcccacagggcccaggcggcctgcagggcgccagcacc

SEQ ID NO: 507 - DNA, 2235 bp, synthetic construct
  misc_feature 1..2235: note = Exemplary ABCD1 coding sequence 07
  source 1..2235: mol_type = other DNA
atgccggtgctgtcgcgcccgcgcccgtggcgcggcaacaccctgaagcgcaccgccgtgctgctggccctggccgcctacggcgcccacaaggtgtacccgctggtgcgccagtgcctggccccggcccgcggcctgcaggccccggccggcgagccgacccaggaggcctcgggcgtggccgccgccaaggccggcatgaaccgcgtgttcctgcagcgcctgctgtggctgctgcgcctgctgttcccgcgcgtgctgtgccgcgagaccggcctgctggccctgcactcggccgccctggtgtcgcgcaccttcctgtcggtgtacgtggcccgcctggacggccgcctggcccgctgcatcgtgcgcaaggacccgcgcgccttcggctggcagctgctgcagtggctgctgatcgccctgccggccaccttcgtgaactcggccatccgctacctggagggccagctggccctgtcgttccgctcgcgcctggtggcccacgcctaccgcctgtacttctcgcagcagacctactaccgcgtgtcgaacatggacggccgcctgcgcaacccggaccagtcgctgaccgaggacgtggtggccttcgccgcctcggtggcccacctgtactcgaacctgaccaagccgctgctggacgtggccgtgacctcgtacaccctgctgcgcgccgcccgctcgcgcggcgccggcaccgcctggccgtcggccatcgccggcctggtggtgttcctgaccgccaacgtgctgcgcgccttctcgccgaagttcggcgagctggtggccgaggaggcccgccgcaagggcgagctgcgctacatgcactcgcgcgtggtggccaactcggaggagatcgccttctacggcggccacgaggtggagctggccctgctgcagcgctcgtaccaggacctggcctcgcagatcaacctgatcctgctggagcgcctgtggtacgtgatgctggagcagttcctgatgaagtacgtgtggtcggcctcgggcctgctgatggtggccgtgccgatcatcaccgccaccggctactcggagtcggacgccgaggccgtgaagaaggccgccctggagaagaaggaggaggagctggtgtcggagcgcaccgaggccttcaccatcgcccgcaacctgctgaccgccgccgccgacgccatcgagcgcatcatgtcgtcgtacaaggaggtgaccgagctggccggctacaccgcccgcgtgcacgagatgttccaggtgttcgaggacgtgcagcgctgccacttcaagcgcccgcgcgagctggaggacgcccaggccggctcgggcaccatcggccgctcgggcgtgcgcgtggagggcccgctgaagatccgcggccaggtggtggacgtggagcagggcatcatctgcgagaacatcccgatcgtgaccccgtcgggcgaggtggtggtggcctcgctgaacatccgcgtggaggagggcatgcacctgctgatcaccggcccgaacggctgcggcaagtcgtcgctgttccgcatcctgggcggcctgtggccgacctacggcggcgtgctgtacaagccgccgccgcagcgcatgttctacatcccgcagcgcccgtacatgtcggtgggctcgctgcgcgaccaggtgatctacccggactcggtggaggacatgcagcgcaagggctactcggagcaggacctggaggccatcctggacgtggtgcacctgcaccacatcctgcagcgcgagggcggctgggaggccatgtgcgactggaaggacgtgctgtcgggcggcgagaagcagcgcatcggcatggcccgcatgttctaccaccgcccgaagtacgccctgctggacgagtgcacctcggccgtgtcgatcgacgtggagggcaagatcttccaggccgccaaggacgccggcatcgccctgctgtcgatcacccaccgcccgtcgctgtggaagtaccacacccacctgctgcagttcgacggcgagggcggctggaagttcgagaagctggactcggccgcccgcctgtcgctgaccgaggagaagcagcgcctggagcagcagctggccggcatcccgaagatgcagcgccgcctgcaggagctgtgccagatcctgggcgaggccgtggccccggcccacgtgccggccccgtcgccgcagggcccgggcggcctgcagggcgcctcgacc

SEQ ID NO: 508 - DNA, 2235 bp, synthetic construct
  misc_feature 1..2235: note = Exemplary ABCD1 coding sequence 08
  source 1..2235: mol_type = other DNA
atgcccgtgctgagccgcccccgcccctggcgcggcaacaccctgaagcgcaccgccgtgctgctggccctggccgcctacggcgcccacaaggtgtaccccctggtgcgccagtgcctggcccccgcccgcggcctgcaggcccccgccggcgagcccacccaggaggccagcggcgtggccgccgccaaggccggcatgaaccgcgtgttcctgcagcgcctgctgtggctgctgcgcctgctgttcccccgcgtgctgtgccgcgagaccggcctgctggccctgcacagcgccgccctggtgagccgcaccttcctgagcgtgtacgtggcccgcctggacggccgcctggcccgctgcatcgtgcgcaaggacccccgcgccttcggctggcagctgctgcagtggctgctgatcgccctgcccgccaccttcgtgaacagcgccatccgctacctggagggccagctggccctgagcttccgcagccgcctggtggcccacgcctaccgcctgtacttcagccagcagacctactaccgcgtgagcaacatggacggccgcctgcgcaaccccgaccagagcctgaccgaggacgtggtggccttcgccgccagcgtggcccacctgtacagcaacctgaccaagcccctgctggacgtggccgtgaccagctacaccctgctgcgcgccgcccgcagccgcggcgccggcaccgcctggcccagcgccatcgccggcctggtggtgttcctgaccgccaacgtgctgcgcgccttcagccccaagttcggcgagctggtggccgaggaggcccgccgcaagggcgagctgcgctacatgcacagccgcgtggtggccaacagcgaggagatcgccttctacggcggccacgaggtggagctggccctgctgcagcgcagctaccaggacctggccagccagatcaacctgatcctgctggagcgcctgtggtacgtgatgctggagcagttcctgatgaagtacgtgtggagcgccagcggcctgctgatggtggccgtgcccatcatcaccgccaccggctacagcgagagcgacgccgaggccgtgaagaaggccgccctggagaagaaggaggaggagctggtgagcgagcgcaccgaggccttcaccatcgcccgcaacctgctgaccgccgccgccgacgccatcgagcgcatcatgagcagctacaaggaggtgaccgagctggccggctacaccgcccgcgtgcacgagatgttccaggtgttcgaggacgtgcagcgctgccacttcaagcgcccccgcgagctggaggacgcccaggccggcagcggcaccatcggccgcagcggcgtgcgcgtggagggccccctgaagatccgcggccaggtggtggacgtggagcagggcatcatctgcgagaacatccccatcgtgacccccagcggcgaggtggtggtggccagcctgaacatccgcgtggaggagggcatgcacctgctgatcaccggccccaacggctgcggcaagagcagcctgttccgcatcctgggcggcctgtggcccacctacggcggcgtgctgtacaagccccccccccagcgcatgttctacatcccccagcgcccctacatgagcgtgggcagcctgcgcgaccaggtgatctaccccgacagcgtggaggacatgcagcgcaagggctacagcgagcaggacctggaggccatcctggacgtggtgcacctgcaccacatcctgcagcgcgagggcggctgggaggccatgtgcgactggaaggacgtgctgagcggcggcgagaagcagcgcatcggcatggcccgcatgttctaccaccgccccaagtacgccctgctggacgagtgcaccagcgccgtgagcatcgacgtggagggcaagatcttccaggccgccaaggacgccggcatcgccctgctgagcatcacccaccgccccagcctgtggaagtaccacacccacctgctgcagttcgacggcgagggcggctggaagttcgagaagctggacagcgccgcccgcctgagcctgaccgaggagaagcagcgcctggagcagcagctggccggcatccccaagatgcagcgccgcctgcaggagctgtgccagatcctgggcgaggccgtggcccccgcccacgtgcccgcccccagcccccagggccccggcggcctgcagggcgccagcacc

SEQ ID NO: 509 - DNA, 2235 bp, synthetic construct
  misc_feature 1..2235: note = Exemplary ABCD1 coding sequence 09
  source 1..2235: mol_type = other DNA
atgcctgttttaagtagacctagaccttggagaggaaatactttaaaaagaactgctgttttattagctttagctgcttatggagctcataaagtttatcctttagttagacaatgcttagctcctgctagaggattacaagctcctgctggagaacctactcaagaagctagtggagttgctgctgctaaagctggaatgaatagagtttttttacaaagattattatggttattaagattattatttcctagagttttatgcagagaaactggattattagctttacatagtgctgctttagttagtagaacttttttaagtgtttatgttgctagattagatggaagattagctagatgcattgttagaaaagatcctagagcttttggatggcaattattacaatggttattaattgctttacctgctacttttgttaatagtgctattagatatttagaaggacaattagctttaagttttagaagtagattagttgctcatgcttatagattatattttagtcaacaaacttattatagagttagtaatatggatggaagattaagaaatcctgatcaaagtttaactgaagatgttgttgcttttgctgctagtgttgctcatttatatagtaatttaactaaacctttattagatgttgctgttactagttatactttattaagagctgctagaagtagaggagctggaactgcttggcctagtgctattgctggattagttgtttttttaactgctaatgttttaagagcttttagtcctaaatttggagaattagttgctgaagaagctagaagaaaaggagaattaagatatatgcatagtagagttgttgctaatagtgaagaaattgctttttatggaggacatgaagttgaattagctttattacaaagaagttatcaagatttagctagtcaaattaatttaattttattagaaagattatggtatgttatgttagaacaatttttaatgaaatatgtttggagtgctagtggattattaatggttgctgttcctattattactgctactggatatagtgaaagtgatgctgaagctgttaaaaaagctgctttagaaaaaaaagaagaagaattagttagtgaaagaactgaagcttttactattgctagaaatttattaactgctgctgctgatgctattgaaagaattatgagtagttataaagaagttactgaattagctggatatactgctagagttcatgaaatgtttcaagtttttgaagatgttcaaagatgccattttaaaagacctagagaattagaagatgctcaagctggaagtggaactattggaagaagtggagttagagttgaaggacctttaaaaattagaggacaagttgttgatgttgaacaaggaattatttgcgaaaatattcctattgttactcctagtggagaagttgttgttgctagtttaaatattagagttgaagaaggaatgcatttattaattactggacctaatggatgcggaaaaagtagtttatttagaattttaggaggattatggcctacttatggaggagttttatataaacctcctcctcaaagaatgttttatattcctcaaagaccttatatgagtgttggaagtttaagagatcaagttatttatcctgatagtgttgaagatatgcaaagaaaaggatatagtgaacaagatttagaagctattttagatgttgttcatttacatcatattttacaaagagaaggaggatgggaagctatgtgcgattggaaagatgttttaagtggaggagaaaaacaaagaattggaatggctagaatgttttatcatagacctaaatatgctttattagatgaatgcactagtgctgttagtattgatgttgaaggaaaaatttttcaagctgctaaagatgctggaattgctttattaagtattactcatagacctagtttatggaaatatcatactcatttattacaatttgatggagaaggaggatggaaatttgaaaaattagatagtgctgctagattaagtttaactgaagaaaaacaaagattagaacaacaattagctggaattcctaaaatgcaaagaagattacaagaattatgccaaattttaggagaagctgttgctcctgctcatgttcctgctcctagtcctcaaggacctggaggattacaaggagctagtact

SEQ ID NO: 510 - DNA, 2235 bp, synthetic construct
  misc_feature 1..2235: note = Exemplary ABCD1 coding sequence 10
  source 1..2235: mol_type = other DNA
atgccggtgctgagccgcccgcgcccgtggcgcggcaacaccctgaaacgcaccgcggtgctgctggcgctggcggcgtatggcgcgcataaagtgtatccgctggtgcgccagtgcctggcgccggcgcgcggcctgcaggcgccggcgggcgaaccgacccaggaagcgagcggcgtggcggcggcgaaagcgggcatgaaccgcgtgtttctgcagcgcctgctgtggctgctgcgcctgctgtttccgcgcgtgctgtgccgcgaaaccggcctgctggcgctgcatagcgcggcgctggtgagccgcacctttctgagcgtgtatgtggcgcgcctggatggccgcctggcgcgctgcattgtgcgcaaagatccgcgcgcgtttggctggcagctgctgcagtggctgctgattgcgctgccggcgacctttgtgaacagcgcgattcgctatctggaaggccagctggcgctgagctttcgcagccgcctggtggcgcatgcgtatcgcctgtattttagccagcagacctattatcgcgtgagcaacatggatggccgcctgcgcaacccggatcagagcctgaccgaagatgtggtggcgtttgcggcgagcgtggcgcatctgtatagcaacctgaccaaaccgctgctggatgtggcggtgaccagctataccctgctgcgcgcggcgcgcagccgcggcgcgggcaccgcgtggccgagcgcgattgcgggcctggtggtgtttctgaccgcgaacgtgctgcgcgcgtttagcccgaaatttggcgaactggtggcggaagaagcgcgccgcaaaggcgaactgcgctatatgcatagccgcgtggtggcgaacagcgaagaaattgcgttttatggcggccatgaagtggaactggcgctgctgcagcgcagctatcaggatctggcgagccagattaacctgattctgctggaacgcctgtggtatgtgatgctggaacagtttctgatgaaatatgtgtggagcgcgagcggcctgctgatggtggcggtgccgattattaccgcgaccggctatagcgaaagcgatgcggaagcggtgaaaaaagcggcgctggaaaaaaaagaagaagaactggtgagcgaacgcaccgaagcgtttaccattgcgcgcaacctgctgaccgcggcggcggatgcgattgaacgcattatgagcagctataaagaagtgaccgaactggcgggctataccgcgcgcgtgcatgaaatgtttcaggtgtttgaagatgtgcagcgctgccattttaaacgcccgcgcgaactggaagatgcgcaggcgggcagcggcaccattggccgcagcggcgtgcgcgtggaaggcccgctgaaaattcgcggccaggtggtggatgtggaacagggcattatttgcgaaaacattccgattgtgaccccgagcggcgaagtggtggtggcgagcctgaacattcgcgtggaagaaggcatgcatctgctgattaccggcccgaacggctgcggcaaaagcagcctgtttcgcattctgggcggcctgtggccgacctatggcggcgtgctgtataaaccgccgccgcagcgcatgttttatattccgcagcgcccgtatatgagcgtgggcagcctgcgcgatcaggtgatttatccggatagcgtggaagatatgcagcgcaaaggctatagcgaacaggatctggaagcgattctggatgtggtgcatctgcatcatattctgcagcgcgaaggcggctgggaagcgatgtgcgattggaaagatgtgctgagcggcggcgaaaaacagcgcattggcatggcgcgcatgttttatcatcgcccgaaatatgcgctgctggatgaatgcaccagcgcggtgagcattgatgtggaaggcaaaatttttcaggcggcgaaagatgcgggcattgcgctgctgagcattacccatcgcccgagcctgtggaaatatcatacccatctgctgcagtttgatggcgaaggcggctggaaatttgaaaaactggatagcgcggcgcgcctgagcctgaccgaagaaaaacagcgcctggaacagcagctggcgggcattccgaaaatgcagcgccgcctgcaggaactgtgccagattctgggcgaagcggtggcgccggcgcatgtgccggcgccgagcccgcagggcccgggcggcctgcagggcgcgagcacc

SEQ ID NO: 511-600 - skipped (90 entries)

SEQ ID NO: 601 - DNA, 145 bp, synthetic construct
  misc_feature 1..145: note = AAV2 5' ITR
  source 1..145: mol_type = other DNA
ttggccactccctctctgcgcgctcgctcgctcactgaggccgggcgaccaaaggtcgcccgacgcccgggctttgcccgggcggcctcagtgagcgagcgagcgcgcagagagggagtggccaactccatcactaggggttcct

SEQ ID NO: 602 - DNA, 145 bp, synthetic construct
  misc_feature 1..145: note = AAV2 3' ITR
  source 1..145: mol_type = other DNA
aggaacccctagtgatggagttggccactccctctctgcgcgctcgctcgctcactgaggccgggcgaccaaaggtcgcccgacgcccgggctttgcccgggcggcctcagtgagcgagcgagcgcgcagagagggagtggccaa

SEQ ID NO: 603-610 - skipped (8 entries)

SEQ ID NO: 611 - DNA, 145 bp, synthetic construct; identical to SEQ ID NO: 601
  misc_feature 1..145: note = Original 5' ITR (AAV2) - Long (WPRE)
  source 1..145: mol_type = other DNA

SEQ ID NO: 612 - DNA, 144 bp, synthetic construct
  misc_feature 1..144: note = Original 3' ITR (AAV2) - Long (WPRE)
  source 1..144: mol_type = other DNA
aggaacccctagtgatggagttggccactccctctctgcgcgctcgctcgctcactgaggccgcccgggcaaagcccgggcgtcgggcgacctttggtcgcccggcctcagtgagcgagcgagcgcgcagagagggagtggcca

SEQ ID NO: 613-699 - skipped (87 entries)

SEQ ID NO: 700 - DNA, 6996 bp, synthetic construct
  misc_feature 1..6996: note = pAAV2/9, full plasmid
  source 1..6996: mol_type = other DNA
cgcagggtctccattttgaagcgggaggtttgaacgcgcagccgccatgccggggttttacgagattgtgattaaggtccccagcgaccttgacgagcatctgcccggcatttctgacagctttgtgaactgggtggccgagaaggaatgggagttgccgccagattctgacatggatctgaatctgattgagcaggcacccctgaccgtggccgagaagctgcagcgcgactttctgacggaatggcgccgtgtgagtaaggccccggaggctcttttctttgtgcaatttgagaagggagagagctacttccacatgcacgtgctcgtggaaaccaccggggtgaaatccatggttttgggacgtttcctgagtcagattcgcgaaaaactgattcagagaatttaccgcgggatcgagccgactttgccaaactggttcgcggtcacaaagaccagaaatggcgccggaggcgggaacaaggtggtggatgagtgctacatccccaattacttgctccccaaaacccagcctgagctccagtgggcgtggactaatatggaacagtatttaagcgcctgtttgaatctcacggagcgtaaacggttggtggcgcagcatctgacgcacgtgtcgcagacgcaggagcagaacaaagagaatcagaatcccaattctgatgcgccggtgatcagatcaaaaacttcagccaggtacatggagctggtcgggtggctcgtggacaaggggattacctcggagaagcagtggatccaggaggaccaggcctcatacatctccttcaatgcggcctccaactcgcggtcccaaatcaaggctgccttggacaatgcgggaaagattatgagcctgactaaaaccgcccccgactacctggtgggccagcagcccgtggaggacatttccagcaatcggatttataaaattttggaactaaacgggtacgatccccaatatgcggcttccgtctttctgggatgggccacgaaaaagttcggcaagaggaacaccatctggctgtttgggcctgcaactaccgggaagaccaacatcgcggaggccatagcccacactgtgcccttctacgggtgcgtaaactggaccaatgagaactttcccttcaacgactgtgtcgacaagatggtgatctggtgggaggaggggaagatgaccgccaaggtcgtggagtcggccaaagccattctcggaggaagcaaggtgcgcgtggaccagaaatgcaagtcctcggcccagatagacccgactcccgtgatcgtcacctccaacaccaacatgtgcgccgtgattgacgggaactcaacgaccttcgaacaccagcagccgttgcaagaccggatgttcaaatttgaactcacccgccgtctggatcatgactttgggaaggtcaccaagcaggaagtcaaagactttttccggtgggcaaaggatcacgtggttgaggtggagcatgaattctacgtcaaaaagggtggagccaagaaaagacccgcccccagtgacgcagatataagtgagcccaaacgggtgcgcgagtcagttgcgcagccatcgacgtcagacgcggaagcttcgatcaactacgcagacaggtaccaaaacaaatgttctcgtcacgtgggcatgaatctgatgctgtttccctgcagacaatgcgagagaatgaatcagaattcaaatatctgcttcactcacggacagaaagactgtttagagtgctttcccgtgtcagaatctcaacccgtttctgtcgtcaaaaaggcgtatcagaaactgtgctacattcatcatatcatgggaaaggtgccagacgcttgcactgcctgcgatctggtcaatgtggatttggatgactgcatctttgaacaataaatgacttaaaccaggtatggctgccgatggttatcttccagattggctcgaggacaaccttagtgaaggaattcgcgagtggtgggctttgaaacctggagcccctcaacccaaggcaaatcaacaacatcaagacaacgctcgaggtcttgtgcttccgggttacaaataccttggacccggcaacggactcgacaagggggagccggtcaacgcagcagacgcggcggccctcgagcacgacaaggcctacgaccagcagctcaaggccggagacaacccgtacctcaagtacaaccacgccgacgccgagttccaggagcggctcaaagaagatacgtcttttgggggcaacctcgggcgagcagtcttccaggccaaaaagaggcttcttgaacctcttggtctggttgaggaagcggctaagacggctcctggaaagaagaggcctgtagagcagtctcctcaggaaccggactcctccgcgggtattggcaaatcgggtgcacagcccgctaaaaagagactcaatttcggtcagactggcgacacagagtcagtcccagaccctcaaccaatcggagaacctcccgcagccccctcaggtgtgggatctcttacaatggcttcaggtggtggcgcaccagtggcagacaataacgaaggtgccgatggagtgggtagttcctcgggaaattggcattgcgattcccaatggctgggggacagagtcatcaccaccagcacccgaacctgggccctgcccacctacaacaatcacctctacaagcaaatctccaacagcacatctggaggatcttcaaatgacaacgcctacttcggctacagcaccccctgggggtattttgacttcaacagattccactgccacttctcaccacgtgactggcagcgactcatcaacaacaactggggattccggcctaagcgactcaacttcaagctcttcaacattcaggtcaaagaggttacggacaacaatggagtcaagaccatcgccaataaccttaccagcacggtccaggtcttcacggactcagactatcagctcccgtacgtgctcgggtcggctcacgagggctgcctcccgccgttcccagcggacgttttcatgattcctcagtacgggtatctgacgcttaatgatggaagccaggccgtgggtcgttcgtccttttactgcctggaatatttcccgtcgcaaatgctaagaacgggtaacaacttccagttcagctacgagtttgagaacgtacctttccatagcagctacgctcacagccaaagcctggaccgactaatgaatccactcatcgaccaatacttgtactatctctcaaagactattaacggttctggacagaatcaacaaacgctaaaattcagtgtggccggacccagcaacatggctgtccagggaagaaactacatacctggacccagctaccgacaacaacgtgtctcaaccactgtgactcaaaacaacaacagcgaatttgcttggcctggagcttcttcttgggctctcaatggacgtaatagcttgatgaatcctggacctgctatggccagccacaaagaaggagaggaccgtttctttcctttgtctggatctttaatttttggcaaacaaggaactggaagagacaacgtggatgcggacaaagtcatgataaccaacgaagaagaaattaaaactactaacccggtagcaacggagtcctatggacaagtggccacaaaccaccagagtgcccaagcacaggcgcagaccggctgggttcaaaaccaaggaatacttccgggtatggtttggcaggacagagatgtgtacctgcaaggacccatttgggccaaaattcctcacacggacggcaactttcacccttctccgctgatgggagggtttggaatgaagcacccgcctcctcagatcctcatcaaaaacacacctgtacctgcggatcctccaacggccttcaacaaggacaagctgaactctttcatcacccagtattctactggccaagtcagcgtggagatcgagtgggagctgcagaaggaaaacagcaagcgctggaacccggagatccagtacacttccaactattacaagtctaataatgttgaatttgctgttaatactgaaggtgtatatagtgaaccccgccccattggcaccagatacctgactcgtaatctgtaattgcttgttaatcaataaaccgtttaattcgtttcagttgaactttggtctctgcgaagggcgaattcgtttaaacctgcaggactagaggtcctgtattagaggtcacgtgagtgttttgcgacattttgcgacaccatgtggtcacgctgggtatttaagcccgagtgagcacgcagggtctccattttgaagcgggaggtttgaacgcgcagccgccaagccgaattcatcccaatggcgcgccgagcttggctcgagcatggtcatagctgtttcctgtgtgaaattgttatccgctcacaattccacacaacatacgagccggaagcataaagtgtaaagcctggggtgcctaatgagtgagctaactcacattaattgcgttgcgctcactgcccgctttccagtcgggaaacctgtcgtgccagctgcattaatgaatcggccaacgcgcggggagaggcggtttgcgtattgggcgctcttccgcttcctcgctcactgactcgctgcgctcggtcgttcggctgcggcgagcggtatcagctcactcaaaggcggtaatacggttatccacagaatcaggggataacgcaggaaagaacatgtgagcaaaaggccagcaaaaggccaggaaccgtaaaaaggccgcgttgctggcgtttttccataggctccgcccccctgacgagcatcacaaaaatcgacgctcaagtcagaggtggcgaaacccgacaggactataaagataccaggcgtttccccctggaagctccctcgtgcgctctcctgttccgaccctgccgcttaccggatacctgtccgcctttctcccttcgggaagcgtggcgctttctcatagctcacgctgtaggtatctcagttcggtgtaggtcgttcgctccaagctgggctgtgtgcacgaaccccccgttcagcccgaccgctgcgccttatccggtaactatcgtcttgagtccaacccggtaagacacgacttatcgccactggcagcagccactggtaacaggattagcagagcgaggtatgtaggcggtgctacagagttcttgaagtggtggcctaactacggctacactagaagaacagtatttggtatctgcgctctgctgaagccagttaccttcggaaaaagagttggtagctcttgatccggcaaacaaaccaccgctggtagcggtggtttttttgtttgcaagcagcagattacgcgcagaaaaaaaggatctcaagaagatcctttgatcttttctacggggtctgacgctcagtggaacgaaaactcacgttaagggattttggtcatgagattatcaaaaaggatcttcacctagatccttttaaattaaaaatgaagttttaaatcaatctaaagtatatatgagtaaacttggtctgacagttagaaaaactcatcgagcatcaaatgaaactgcaatttattcatatcaggattatcaataccatatttttgaaaaagccgtttctgtaatgaaggagaaaactcaccgaggcagttccataggatggcaagatcctggtatcggtctgcgattccgactcgtccaacatcaatacaacctattaatttcccctcgtcaaaaataaggttatcaagtgagaaatcaccatgagtgacgactgaatccggtgagaatggcaaaagtttatgcatttctttccagacttgttcaacaggccagccattacgctcgtcatcaaaatcactcgcatcaaccaaaccgttattcattcgtgattgcgcctgagcgagacgaaatacgcgatcgctgttaaaaggacaattacaaacaggaatcgaatgcaaccggcgcaggaacactgccagcgcatcaacaatattttcacctgaatcaggatattcttctaatacctggaatgctgttttcccagggatcgcagtggtgagtaaccatgcatcatcaggagtacggataaaatgcttgatggtcggaagaggcataaattccgtcagccagtttagtctgaccatctcatctgtaacatcattggcaacgctacctttgccatgtttcagaaacaactctggcgcatcgggcttcccatacaatcgatagattgtcgcacctgattgcccgacattatcgcgagcccatttatacccatataaatcagcatccatgttggaatttaatcgcggcctagagcaagacgtttcccgttgaatatggctcatactcttcctttttcaatattattgaagcatttatcagggttattgtctcatgagcggatacatatttgaatgtatttagaaaaataaacaaataggggttccgcgcacatttccccgaaaagtgccacctgacgtctaagaaaccattattatcatgacattaacctataaaaataggcgtatcacgaggccctttcgtctcgcgcgtttcggtgatgacggtgaaaacctctgacacatgcagctcccggagacggtcacagcttgtctgtaagcggatgccgggagcagacaagcccgtcagggcgcgtcagcgggtgttggcgggtgtcggggctggcttaactatgcggcatcagagcagattgtactgagagtgcaccatatgcggtgtgaaataccgcacagatgcgtaaggagaaaataccgcatcaggcgccattcgccattcaggctgcgcaactgttgggaagggcgatcggtgcgggcctcttcgctattacgccagctggcgaaagggggatgtgctgcaaggcgattaagttgggtaacgccagggttttcccagtcacgacgttgtaaaacgacggccagtgaattgacgcgtattgggat

SEQ ID NO: 701-709 - skipped (9 entries)

SEQ ID NO: 710 - DNA, 99 bp, synthetic construct
  misc_feature 1..99: note = AAV2 p5
  source 1..99: mol_type = other DNA
gaggtcctgtattagaggtcacgtgagtgttttgcgacattttgcgacaccatgtggtcacgctgggtatttaagcccgagtgagcacgcagggtctcc

SEQ ID NO: 711 - protein, 621 aa, synthetic construct
  REGION 1..621: note = AAV2 REP78
MPGFYEIVIKVPSDLDEHLPGISDSFVNWVAEKEWELPPDSDMDLNLIEQAPLTVAEKLQRDFLTEWRRVSKAPEALFFVQFEKGESYFHMHVLVETTGVKSMVLGRFLSQIREKLIQRIYRGIEPTLPNWFAVTKTRNGAGGGNKVVDECYIPNYLLPKTQPELQWAWTNMEQYLSACLNLTERKRLVAQHLTHVSQTQEQNKENQNPNSDAPVIRSKTSARYMELVGWLVDKGITSEKQWIQEDQASYISFNAASNSRSQIKAALDNAGKIMSLTKTAPDYLVGQQPVEDISSNRIYKILELNGYDPQYAASVFLGWATKKFGKRNTIWLFGPATTGKTNIAEAIAHTVPFYGCVNWTNENFPFNDCVDKMVIWWEEGKMTAKVVESAKAILGGSKVRVDQKCKSSAQIDPTPVIVTSNTNMCAVIDGNSTTFEHQQPLQDRMFKFELTRRLDHDFGKVTKQEVKDFFRWAKDHVVEVEHEFYVKKGGAKKRPAPSDADISEPKRVRESVAQPSTSDAEASINYADRYQNKCSRHVGMNLMLFPCRQCERMNQNSNICFTHGQKDCLECFPVSESQPVSVVKKAYQKLCYIHHIMGKVPDACTACDLVNVDLDDCIFEQ

SEQ ID NO: 712 - protein, 535 aa, synthetic construct
  REGION 1..535: note = AAV2 REP68
MPGFYEIVIKVPSDLDEHLPGISDSFVNWVAEKEWELPPDSDMDLNLIEQAPLTVAEKLQRDFLTEWRRVSKAPEALFFVQFEKGESYFHMHVLVETTGVKSMVLGRFLSQIREKLIQRIYRGIEPTLPNWFAVTKTRNGAGGGNKVVDECYIPNYLLPKTQPELQWAWTNMEQYLSACLNLTERKRLVAQHLTHVSQTQEQNKENQNPNSDAPVIRSKTSARYMELVGWLVDKGITSEKQWIQEDQASYISFNAASNSRSQIKAALDNAGKIMSLTKTAPDYLVGQQPVEDISSNRIYKILELNGYDPQYAASVFLGWATKKFGKRNTIWLFGPATTGKTNIAEAIAHTVPFYGCVNWTNENFPFNDCVDKMVIWWEEGKMTAKVVESAKAILGGSKVRVDQKCKSSAQIDPTPVIVTSNTNMCAVIDGNSTTFEHQQPLQDRMFKFELTRRLDHDFGKVTKQEVKDFFRWAKDHVVEVEHEFYVKKGGAKKRPAPSDADISEPKRVRESVAQPSTSDAEASINYADRLARGQP

SEQ ID NO: 713-719 - skipped (7 entries)

SEQ ID NO: 720 - DNA, 154 bp, synthetic construct
  misc_feature 1..154: note = AAV2 p19
  source 1..154: mol_type = other DNA
gtcacaaagaccagaaatggcgccggaggcgggaacaaggtggtggatgagtgctacatccccaattacttgctccccaaaacccagcctgagctccagtgggcgtggactaatatggaacagtatttaagcgcctgtttgaatctcacggagc

SEQ ID NO: 721 - protein, 397 aa, synthetic construct
  REGION 1..397: note = AAV2 REP52
MELVGWLVDKGITSEKQWIQEDQASYISFNAASNSRSQIKAALDNAGKIMSLTKTAPDYLVGQQPVEDISSNRIYKILELNGYDPQYAASVFLGWATKKFGKRNTIWLFGPATTGKTNIAEAIAHTVPFYGCVNWTNENFPFNDCVDKMVIWWEEGKMTAKVVESAKAILGGSKVRVDQKCKSSAQIDPTPVIVTSNTNMCAVIDGNSTTFEHQQPLQDRMFKFELTRRLDHDFGKVTKQEVKDFFRWAKDHVVEVEHEFYVKKGGAKKRPAPSDADISEPKRVRESVAQPSTSDAEASINYADRYQNKCSRHVGMNLMLFPCRQCERMNQNSNICFTHGQKDCLECFPVSESQPVSVVKKAYQKLCYIHHIMGKVPDACTACDLVNVDLDDCIFEQ

SEQ ID NO: 722 - protein, 311 aa, synthetic construct
  REGION 1..311: note = AAV2 REP40
MELVGWLVDKGITSEKQWIQEDQASYISFNAASNSRSQIKAALDNAGKIMSLTKTAPDYLVGQQPVEDISSNRIYKILELNGYDPQYAASVFLGWATKKFGKRNTIWLFGPATTGKTNIAEAIAHTVPFYGCVNWTNENFPFNDCVDKMVIWWEEGKMTAKVVESAKAILGGSKVRVDQKCKSSAQIDPTPVIVTSNTNMCAVIDGNSTTFEHQQPLQDRMFKFELTRRLDHDFGKVTKQEVKDFFRWAKDHVVEVEHEFYVKKGGAKKRPAPSDADISEPKRVRESVAQPSTSDAEASINYADRLARGQP

SEQ ID NO: 723-729 - skipped (7 entries)

SEQ ID NO: 730 - DNA, 154 bp, synthetic construct
  misc_feature 1..154: note = AAV p40
  source 1..154: mol_type = other DNA
ggtcaccaagcaggaagtcaaagactttttccggtgggcaaaggatcacgtggttgaggtggagcatgaattctacgtcaaaaagggtggagccaagaaaagacccgcccccagtgacgcagatataagtgagcccaaacgggtgcgcgagtca

SEQ ID NO: 731 - protein, 736 aa, synthetic construct
  REGION 1..736: note = AAV9 VP1
MAADGYLPDWLEDNLSEGIREWWALKPGAPQPKANQQHQDNARGLVLPGYKYLGPGNGLDKGEPVNAADAAALEHDKAYDQQLKAGDNPYLKYNHADAEFQERLKEDTSFGGNLGRAVFQAKKRLLEPLGLVEEAAKTAPGKKRPVEQSPQEPDSSAGIGKSGAQPAKKRLNFGQTGDTESVPDPQPIGEPPAAPSGVGSLTMASGGGAPVADNNEGADGVGSSSGNWHCDSQWLGDRVITTSTRTWALPTYNNHLYKQISNSTSGGSSNDNAYFGYSTPWGYFDFNRFHCHFSPRDWQRLINNNWGFRPKRLNFKLFNIQVKEVTDNNGVKTIANNLTSTVQVFTDSDYQLPYVLGSAHEGCLPPFPADVFMIPQYGYLTLNDGSQAVGRSSFYCLEYFPSQMLRTGNNFQFSYEFENVPFHSSYAHSQSLDRLMNPLIDQYLYYLSKTINGSGQNQQTLKFSVAGPSNMAVQGRNYIPGPSYRQQRVSTTVTQNNNSEFAWPGASSWALNGRNSLMNPGPAMASHKEGEDRFFPLSGSLIFGKQGTGRDNVDADKVMITNEEEIKTTNPVATESYGQVATNHQSAQAQAQTGWVQNQGILPGMVWQDRDVYLQGPIWAKIPHTDGNFHPSPLMGGFGMKHPPPQILIKNTPVPADPPTAFNKDKLNSFITQYSTGQVSVEIEWELQKENSKRWNPEIQYTSNYYKSNNVEFAVNTEGVYSEPRPIGTRYLTRNL

SEQ ID NO: 732 - protein, 599 aa, synthetic construct
  REGION 1..599: note = AAV9 VP2
TAPGKKRPVEQSPQEPDSSAGIGKSGAQPAKKRLNFGQTGDTESVPDPQPIGEPPAAPSGVGSLTMASGGGAPVADNNEGADGVGSSSGNWHCDSQWLGDRVITTSTRTWALPTYNNHLYKQISNSTSGGSSNDNAYFGYSTPWGYFDFNRFHCHFSPRDWQRLINNNWGFRPKRLNFKLFNIQVKEVTDNNGVKTIANNLTSTVQVFTDSDYQLPYVLGSAHEGCLPPFPADVFMIPQYGYLTLNDGSQAVGRSSFYCLEYFPSQMLRTGNNFQFSYEFENVPFHSSYAHSQSLDRLMNPLIDQYLYYLSKTINGSGQNQQTLKFSVAGPSNMAVQGRNYIPGPSYRQQRVSTTVTQNNNSEFAWPGASSWALNGRNSLMNPGPAMASHKEGEDRFFPLSGSLIFGKQGTGRDNVDADKVMITNEEEIKTTNPVATESYGQVATNHQSAQAQAQTGWVQNQGILPGMVWQDRDVYLQGPIWAKIPHTDGNFHPSPLMGGFGMKHPPPQILIKNTPVPADPPTAFNKDKLNSFITQYSTGQVSVEIEWELQKENSKRWNPEIQYTSNYYKSNNVEFAVNTEGVYSEPRPIGTRYLTRNL

SEQ ID NO: 733 - protein, 534 aa, synthetic construct
  REGION 1..534: note = AAV9 VP3
MASGGGAPVADNNEGADGVGSSSGNWHCDSQWLGDRVITTSTRTWALPTYNNHLYKQISNSTSGGSSNDNAYFGYSTPWGYFDFNRFHCHFSPRDWQRLINNNWGFRPKRLNFKLFNIQVKEVTDNNGVKTIANNLTSTVQVFTDSDYQLPYVLGSAHEGCLPPFPADVFMIPQYGYLTLNDGSQAVGRSSFYCLEYFPSQMLRTGNNFQFSYEFENVPFHSSYAHSQSLDRLMNPLIDQYLYYLSKTINGSGQNQQTLKFSVAGPSNMAVQGRNYIPGPSYRQQRVSTTVTQNNNSEFAWPGASSWALNGRNSLMNPGPAMASHKEGEDRFFPLSGSLIFGKQGTGRDNVDADKVMITNEEEIKTTNPVATESYGQVATNHQSAQAQAQTGWVQNQGILPGMVWQDRDVYLQGPIWAKIPHTDGNFHPSPLMGGFGMKHPPPQILIKNTPVPADPPTAFNKDKLNSFITQYSTGQVSVEIEWELQKENSKRWNPEIQYTSNYYKSNNVEFAVNTEGVYSEPRPIGTRYLTRNL

SEQ ID NO: 734-830 - skipped (97 entries)

SEQ ID NO: 831 - protein, 735 aa, synthetic construct [sequence omitted]

SEQ ID NO: 832 - protein, 598 aa, synthetic construct
  REGION 1..598: note = AAV2 VP2
MAPGKKRPVEHSPVEPDSSSGTGKAGQQPARKRLNFGQTGDADSVPDPQPLGQPPAAPSGLGTNTMATGSGAPMADNNEGADGVGNSSGNWHCDSTWMGDRVITTSTRTWALPTYNNHLYKQISSQSGASNDNHYFGYSTPWGYFDFNRFHCHFSPRDWQRLINNNWGFRPKRLNFKLFNIQVKEVTQNDGTTTIANNLTSTVQVFTDSEYQLPYVLGSAHQGCLPPFPADVFMVPQYGYLTLNNGSQAVGRSSFYCLEYFPSQMLRTGNNFTFSYTFEDVPFHSSYAHSQSLDRLMNPLIDQYLYYLSRTNTPSGTTTQSRLQFSQAGASDIRDQSRNWLPGPCYRQQRVSKTSADNNNSEYSWTGATKYHLNGRDSLVNPGPAMASHKDDEEKFFPQSGVLIFGKQGSEKTNVDIEKVMITDEEEIRTTNPVATEQYGSVSTNLQRGNRQAATADVNTQGVLPGMVWQDRDVYLQGPIWAKIPHTDGHFHPSPLMGGFGLKHPPPQILIKNTPVPANPSTTFSAAKFASFITQYSTGQVSVEIEWELQKENSKRWNPEIQYTSNYNKSVNVDFTVDTNGVYSEPRPIGTRYLTRNL

SEQ ID NO: 833 - protein, 533 aa, synthetic construct
  REGION 1..533: note = AAV2 VP3
MATGSGAPMADNNEGADGVGNSSGNWHCDSTWMGDRVITTSTRTWALPTYNNHLYKQISSQSGASNDNHYFGYSTPWGYFDFNRFHCHFSPRDWQRLINNNWGFRPKRLNFKLFNIQVKEVTQNDGTTTIANNLTSTVQVFTDSEYQLPYVLGSAHQGCLPPFPADVFMVPQYGYLTLNNGSQAVGRSSFYCLEYFPSQMLRTGNNFTFSYTFEDVPFHSSYAHSQSLDRLMNPLIDQYLYYLSRTNTPSGTTTQSRLQFSQAGASDIRDQSRNWLPGPCYRQQRVSKTSADNNNSEYSWTGATKYHLNGRDSLVNPGPAMASHKDDEEKFFPQSGVLIFGKQGSEKTNVDIEKVMITDEEEIRTTNPVATEQYGSVSTNLQRGNRQAATADVNTQGVLPGMVWQDRDVYLQGPIWAKIPHTDGHFHPSPLMGGFGLKHPPPQILIKNTPVPANPSTTFSAAKFASFITQYSTGQVSVEIEWELQKENSKRWNPEIQYTSNYNKSVNVDFTVDTNGVYSEPRPIGTRYLTRNL

SEQ ID NO: 834-930 - skipped (97 entries)

SEQ ID NO: 931 - protein, 738 aa, synthetic construct
  REGION 1..738: note = AAVrh10 VP1
MAADGYLPDWLEDNLSEGIREWWDLKPGAPKPKANQQKQDDGRGLVLPGYKYLGPFNGLDKGEPVNAADAAALEHDKAYDQQLKAGDNPYLRYNHADAEFQERLQEDTSFGGNLGRAVFQAKKRVLEPLGLVEEGAKTAPGKKRPVEPSPQRSPDSSTGIGKKGQQPAKKRLNFGQTGDSESVPDPQPIGEPPAGPSGLGSGTMAAGGGAPMADNNEGADGVGSSSGNWHCDSTWLGDRVITTSTRTWALPTYNNHLYKQISNGTSGGSTNDNTYFGYSTPWGYFDFNRFHCHFSPRDWQRLINNNWGFRPKRLNFKLFNIQVKEVTQNEGTKTIANNLTSTIQVFTDSEYQLPYVLGSAHQGCLPPFPADVFMIPQYGYLTLNNGSQAVGRSSFYCLEYFPSQMLRTGNNFEFSYQFEDVPFHSSYAHSQSLDRLMNPLIDQYLYYLSRTQSTGGTAGTQQLLFSQAGPNNMSAQAKNWLPGPCYRQQRVSTTLSQNNNSNFAWTGATKYHLNGRDSLVNPGVAMATHKDDEERFFPSSGVLMFGKQGAGKDNVDYSSVMLTSEEEIKTTNPVATEQYGVVADNLQQQNAAPIVGAVNSQGALPGMVWQNRDVYLQGPIWAKIPHTDGNFHPSPLMGGFGLKHPPPQILIKNTPVPADPPTTFSQAKLASFITQYSTGQVSVEIEWELQKENSKRWNPEIQYTSNYYKSTNVDFAVNTDGTYSEPRPIGTRYLTRNL

SEQ ID NO: 932 - protein, 601 aa, synthetic construct
  REGION 1..601: note = AAVrh10 VP2
TAPGKKRPVEPSPQRSPDSSTGIGKKGQQPAKKRLNFGQTGDSESVPDPQPIGEPPAGPSGLGSGTMAAGGGAPMADNNEGADGVGSSSGNWHCDSTWLGDRVITTSTRTWALPTYNNHLYKQISNGTSGGSTNDNTYFGYSTPWGYFDFNRFHCHFSPRDWQRLINNNWGFRPKRLNFKLFNIQVKEVTQNEGTKTIANNLTSTIQVFTDSEYQLPYVLGSAHQGCLPPFPADVFMIPQYGYLTLNNGSQAVGRSSFYCLEYFPSQMLRTGNNFEFSYQFEDVPFHSSYAHSQSLDRLMNPLIDQYLYYLSRTQSTGGTAGTQQLLFSQAGPNNMSAQAKNWLPGPCYRQQRVSTTLSQNNNSNFAWTGATKYHLNGRDSLVNPGVAMATHKDDEERFFPSSGVLMFGKQGAGKDNVDYSSVMLTSEEEIKTTNPVATEQYGVVADNLQQQNAAPIVGAVNSQGALPGMVWQNRDVYLQGPIWAKIPHTDGNFHPSPLMGGFGLKHPPPQILIKNTPVPADPPTTFSQAKLASFITQYSTGQVSVEIEWELQKENSKRWNPEIQYTSNYYKSTNVDFAVNTDGTYSEPRPIGTRYLTRNL

SEQ ID NO: 933 - protein, 535 aa, synthetic construct
  REGION 1..535: note = AAVrh10 VP3
MAAGGGAPMADNNEGADGVGSSSGNWHCDSTWLGDRVITTSTRTWALPTYNNHLYKQISNGTSGGSTNDNTYFGYSTPWGYFDFNRFHCHFSPRDWQRLINNNWGFRPKRLNFKLFNIQVKEVTQNEGTKTIANNLTSTIQVFTDSEYQLPYVLGSAHQGCLPPFPADVFMIPQYGYLTLNNGSQAVGRSSFYCLEYFPSQMLRTGNNFEFSYQFEDVPFHSSYAHSQSLDRLMNPLIDQYLYYLSRTQSTGGTAGTQQLLFSQAGPNNMSAQAKNWLPGPCYRQQRVSTTLSQNNNSNFAWTGATKYHLNGRDSLVNPGVAMATHKDDEERFFPSSGVLMFGKQGAGKDNVDYSSVMLTSEEEIKTTNPVATEQYGVVADNLQQQNAAPIVGAVNSQGALPGMVWQNRDVYLQGPIWAKIPHTDGNFHPSPLMGGFGLKHPPPQILIKNTPVPADPPTTFSQAKLASFITQYSTGQVSVEIEWELQKENSKRWNPEIQYTSNYYKSTNVDFAVNTDGTYSEPRPIGTRYLTRNL

SEQ ID NO: 934-1999 - skipped (1066 entries)

SEQ ID NO: 2000 - DNA, 32767 bp, synthetic construct
  misc_feature 1..32767: note = Adenovirus 5 (WT)
  source 1..32767: mol_type = other DNA
catcatcaataatataccttattttggattgaagccaatatgataatgagggggtggagtttgtgacgtggcgcggggcgtgggaacggggcgggtgacgtagtagtgtggcggaagtgtgatgttgcaagtgtggcggaacacatgtaagcgacggatgtggcaaaagtgacgtttttggtgtgcgccggtgtacacaggaagtgacaattttcgcgcggttttaggcggatgttgtagtaaatttgggcgtaaccgagtaagatttggccattttcgcgggaaaactgaataagaggaagtgaaatctgaataattttgtgttactcatagcgcgtaatatttgtctagggccgcggggactttgaccgtttacgtggagactcgcccaggtgtttttctcaggtgttttccgcgttccgggtcaaagttggcgttttattattatagtcagctgacgtgtagtgtatttatacccggtgagttcctcaagaggccactcttgagtgccagcgagtagagttttctcctccgagccgctccgacaccgggactgaaaatgagacatattatctgccacggaggtgttattaccgaagaaatggccgccagtcttttggaccagctgatcgaagaggtactggctgataatcttccacctcctagccattttgaaccacctacccttcacgaactgtatgatttagacgtgacggcccccgaagatcccaacgaggaggcggtttcgcagatttttcccgactctgtaatgttggcggtgcaggaagggattgacttactcacttttccgccggcgcccggttctccggagccgcctcacctttcccggcagcccgagcagccggagcagagagccttgggtccggtttctatgccaaaccttgtaccggaggtgatcgatcttacctgccacgaggctggctttccacccagtgacgacgaggatgaagagggtgaggagtttgtgttagattatgtggagcaccccgggcacggttgcaggtcttgtcattatcaccggaggaatacgggggacccagatattatgtgttcgctttgctatatgaggacctgtggcatgtttgtctacagtaagtgaaaattatgggcagtgggtgatagagtggtgggtttggtgtggtaattttttttttaatttttacagttttgtggtttaaagaattttgtattgtgatttttttaaaaggtcctgtgtctgaacctgagcctgagcccgagccagaaccggagcctgcaagacctacccgccgtcctaaaatggcgcctgctatcctgagacgcccgacatcacctgtgtctagagaatgcaatagtagtacggatagctgtgactccggtccttctaacacacctcctgagatacacccggtggtcccgctgtgccccattaaaccagttgccgtgagagttggtgggcgtcgccaggctgtggaatgtatcgaggacttgcttaacgagcctgggcaacctttggacttgagctgtaaacgccccaggccataaggtgtaaacctgtgattgcgtgtgtggttaacgcctttgtttgctgaatgagttgatgtaagtttaataaagggtgagataatgtttaacttgcatggcgtgttaaatggggcggggcttaaagggtatataatgcgccgtgggctaatcttggttacatctgacctcatggaggcttgggagtgtttggaagatttttctgctgtgcgtaacttgctggaacagagctctaacagtacctcttggttttggaggtttctgtggggctcatcccaggcaaagttagtctgcagaattaaggaggattacaagtgggaatttgaagagcttttgaaatcctgtggtgagctgtttgattctttgaatctgggtcaccaggcgcttttccaagagaaggtcatcaagactttggatttttccacaccggggcgcgctgcggctgctgttgcttttttgagttttataaaggataaatggagcgaagaaacccatctgagcggggggtacctgctggattttctggccatgcatctgtggagagcggttgtgagacacaagaatcgcctgctactgttgtcttccgtccgcccggcgataataccgacggaggagcagcagcagcagcaggaggaagccaggcggcggcggcaggagcagagcccatggaacccgagagccggcctggaccctcgggaatgaatgttgtacaggtggctgaactgtatccagaactgagacgcattttgacaattacagaggatgggcaggggctaaagggggtaaagagggagcggggggcttgtgaggctacagaggaggctaggaatctagcttttagcttaatgaccagacaccgtcctgagtgtattacttttcaacagatcaaggataattgcgctaatgagcttgatctgctggcgcagaagtattccatagagcagctgaccacttactggctgcagccaggggatgattttgaggaggctattagggtatatgcaaaggtggcacttaggccagattgcaagtacaagatcagcaaacttgtaaatatcaggaattgttgctacatttctgggaacggggccgaggtggagatagatacggaggatagggtggcctttagatgtagcatgataaatatgtggccgggggtgcttggcatggacggggtggttattatgaatgtaaggtttactggccccaattttagcggtacggttttcctggccaataccaaccttatcctacacggtgtaagcttctatgggtttaacaatacctgtgtggaagcctggaccgatgtaagggttcggggctgtgccttttactgctgctggaagggggtggtgtgtcgccccaaaagcagggcttcaattaagaaatgcctctttgaaaggtgtaccttgggtatcctgtctgagggtaactccagggtgcgccacaatgtggcctccgactgtggttgcttcatgctagtgaaaagcgtggctgtgattaagcataacatggtatgtggcaactgcgaggacagggcctctcagatgctgacctgctcggacggcaactgtcacctgctgaagaccattcacgtagccagccactctcgcaaggcctggccagtgtttgagcataacatactgacccgctgttccttgcatttgggtaacaggaggggggtgttcctaccttaccaatgcaatttgagtcacactaagatattgcttgagcccgagagcatgtccaaggtgaacctgaacggggtgtttgacatgaccatgaagatctggaaggtgctgaggtacgatgagacccgcaccaggtgcagaccctgcgagtgtggcggtaaacatattaggaaccagcctgtgatgctggatgtgaccgaggagctgaggcccgatcacttggtgctggcctgcacccgcgctgagtttggctctagcgatgaagatacagattgaggtactgaaatgtgtgggcgtggcttaagggtgggaaagaatatataaggtgggggtcttatgtagttttgtatctgttttgcagcagccgccgccgccatgagcaccaactcgtttgatggaagcattgtgagctcatatttgacaacgcgcatgcccccatgggccggggtgcgtcagaatgtgatgggctccagcattgatggtcgccccgtcctgcccgcaaactctactaccttgacctacgagaccgtgtctggaacgccgttggagactgcagcctccgccgccgcttcagccgctgcagccaccgcccgcgggattgtgactgactttgctttcctgagcccgcttgcaagcagtgcagcttcccgttcatccgcccgcgatgacaagttgacggctcttttggcacaattggattctttgacccgggaacttaatgtcgtttctcagcagctgttggatctgcgccagcaggtttctgccctgaaggcttcctcccctcccaatgcggtttaaaacataaataaaaaaccagactctgtttggatttggatcaagcaagtgtcttgctgtctttatttaggggttttgcgcgcgcggtaggcccgggaccagcggtctcggtcgttgagggtcctgtgtattttttccaggacgtggtaaaggtgactctggatgttcagatacatgggcataagcccgtctctggggtggaggtagcaccactgcagagcttcatgctgcggggtggtgttgtagatgatccagtcgtagcaggagcgctgggcgtggtgcctaaaaatgtctttcagtagcaagctgattgccaggggcaggcccttggtgtaagtgtttacaaagcggttaagctgggatgggtgcatacgtggggatatgagatgcatcttggactgtatttttaggttggctatgttcccagccatatccctccggggattcatgttgtgcagaaccaccagcacagtgtatccggtgcacttgggaaatttgtcatgtagcttagaaggaaatgcgtggaagaacttggagacgcccttgtgacctccaagattttccatgcattcgtccataatgatggcaatgggcccacgggcggcggcctgggcgaagatatttctgggatcactaacgtcatagttgtgttccaggatgagatcgtcataggccatttttacaaagcgcgggcggagggtgccagactgcggtataatggttccatccggcccaggggcgtagttaccctcacagatttgcatttcccacgctttgagttcagatggggggatcatgtctacctgcggggcgatgaagaaaacggtttccggggtaggggagatcagctgggaagaaagcaggttcctgagcagctgcgacttaccgcagccggtgggcccgtaaatcacacctattaccgggtgcaactggtagttaagagagctgcagctgccgtcatccctgagcaggggggccacttcgttaagcatgtccctgactcgcatgttttccctgaccaaatccgccagaaggcgctcgccgcccagcgatagcagttcttgcaaggaagcaaagtttttcaacggtttgagaccgtccgccgtaggcatgcttttgagcgtttgaccaagcagttccaggcggtcccacagctcggtcacctgctctacggcatctcgatccagcatatctcctcgtttcgcgggttggggcggctttcgctgtacggcagtagtcggtgctcgtccagacgggccagggtcatgtctttccacgggcgcagggtcctcgtcagcgtagtctgggtcacggtgaaggggtgcgctccgggctgcgcgctggccagggtgcgcttgaggctggtcctgctggtgctgaagcgctgccggtcttcgccctgcgcgtcggccaggtagcatttgaccatggtgtcatagtccagcccctccgcggcgtggcccttggcgcgcagcttgcccttggaggaggcgccgcacgaggggcagtgcagacttttgagggcgtagagcttgggcgcgagaaataccgattccggggagtaggcatccgcgccgcaggccccgcagacggtctcgcattccacgagccaggtgagctctggccgttcggggtcaaaaaccaggtttcccccatgctttttgatgcgtttcttacctctggtttccatgagccggtgtccacgctcggtgacgaaaaggctgtccgtgtccccgtatacagacttgagaggcctgtcctcgagcggtgttccgcggtcctcctcgtatagaaactcggaccactctgagacaaaggctcgcgtccaggccagcacgaaggaggctaagtgggaggggtagcggtcgttgtccactagggggtccactcgctccagggtgtgaagacacatgtcgccctcttcggcatcaaggaaggtgattggtttgtaggtgtaggccacgtgaccgggtgttcctgaaggggggctataaaagggggtgggggcgcgttcgtcctcactctcttccgcatcgctgtctgcgagggccagctgttggggtgagtactccctctgaaaagcgggcatgacttctgcgctaagattgtcagtttccaaaaacgaggaggatttgatattcacctggcccgcggtgatgcctttgagggtggccgcatccatctggtcagaaaagacaatctttttgttgtcaagcttggtggcaaacgacccgtagagggcgttggacagcaacttggcgatggagcgcagggtttggtttttgtcgcgatcggcgcgctccttggccgcgatgtttagctgcacgtattcgcgcgcaacgcaccgccattcgggaaagacggtggtgcgctcgtcgggcaccaggtgcacgcgccaaccgcggttgtgcagggtgacaaggtcaacgctggtggctacctctccgcgtaggcgctcgttggtccagcagaggcggccgcccttgcgcgagcagaatggcggtagggggtctagctgcgtctcgtccggggggtctgcgtccacggtaaagaccccgggcagcaggcgcgcgtcgaagtagtctatcttgcatccttgcaagtctagcgcctgctgccatgcgcgggcggcaagcgcgcgctcgtatgggttgagtgggggaccccatggcatggggtgggtgagcgcggaggcgtacatgccgcaaatgtcgtaaacgtagaggggctctctgagtattccaagatatgtagggtagcatcttccaccgcggatgctggcgcgcacgtaatcgtatagttcgtgcgagggagcgaggaggtcgggaccgaggttgctacgggcgggctgctctgctcggaagactatctgcctgaagatggcatgtgagttggatgatatggttggacgctggaagacgttgaagctggcgtctgtgagacctaccgcgtcacgcacgaaggaggcgtaggagtcgcgcagcttgttgaccagctcggcggtgacctgcacgtctagggcgcagtagtccagggtttccttgatgatgtcatacttatcctgtcccttttttttccacagctcgcggttgaggacaaactcttcgcggtctttccagtactcttggatcggaaacccgtcggcctccgaacggtaagagcctagcatgtagaactggttgacggcctggtaggcgcagcatcccttttctacgggtagcgcgtatgcctgcgcggccttccggagcgaggtgtgggtgagcgcaaaggtgtccctgaccatgactttgaggtactggtatttgaagtcagtgtcgtcgcatccgccctgctcccagagcaaaaagtccgtgcgctttttggaacgcggatttggcagggcgaaggtgacatcgttgaagagtatctttcccgcgcgaggcataaagttgcgtgtgatgcggaagggtcccggcacctcggaacggttgttaattacctgggcggcgagcacgatctcgtcaaagccgttgatgttgtggcccacaatgtaaagttccaagaagcgcgggatgcccttgatggaaggcaattttttaagttcctcgtaggtgagctcttcaggggagctgagcccgtgctctgaaagggcccagtctgcaagatgagggttggaagcgacgaatgagctccacaggtcacgggccattagcatttgcaggtggtcgcgaaaggtcctaaactggcgacctatggccattttttctggggtgatgcagtagaaggtaagcgggtcttgttcccagcggtcccatccaaggttcgcggctaggtctcgcgcggcagtcactagaggctcatctccgccgaacttcatgaccagcatgaagggcacgagctgcttcccaaaggcccccatccaagtataggtctctacatcgtaggtgacaaagagacgctcggtgcgaggatgcgagccgatcgggaagaactggatctcccgccaccaattggaggagtggctattgatgtggtgaaagtagaagtccctgcgacgggccgaacactcgtgctggcttttgtaaaaacgtgcgcagtactggcagcggtgcacgggctgtacatcctgcacgaggttgacctgacgaccgcgcacaaggaagcagagtgggaatttgagcccctcgcctggcgggtttggctggtggtcttctacttcggctgcttgtccttgaccgtctggctgctcgaggggagttacggtggatcggaccaccacgccgcgcgagcccaaagtccagatgtccgcgcgcggcggtcggagcttgatgacaacatcgcgcagatgggagctgtccatggtctggagctcccgcggcgtcaggtcaggcgggagctcctgcaggtttacctcgcatagacgggtcagggcgcgggctagatccaggtgatacctaatttccaggggctggttggtggcggcgtcgatggcttgcaagaggccgcatccccgcggcgcgactacggtaccgcgcggcgggcggtgggccgcgggggtgtccttggatgatgcatctaaaagcggtgacgcgggcgagcccccggaggtagggggggctccggacccgccgggagagggggcaggggcacgtcggcgccgcgcgcgggcaggagctggtgctgcgcgcgtaggttgctggcgaacgcgacgacgcggcggttgatctcctgaatctggcgcctctgcgtgaagacgacgggcccggtgagcttgagcctgaaagagagttcgacagaatcaatttcggtgtcgttgacggcggcctggcgcaaaatctcctgcacgtctcctgagttgtcttgataggcgatctcggccatgaactgctcgatctcttcctcctggagatctccgcgtccggctcgctccacggtggcggcgaggtcgttggaaatgcgggccatgagctgcgagaaggcgttgaggcctccctcgttccagacgcggctgtagaccacgcccccttcggcatcgcgggcgcgcatgaccacctgcgcgagattgagctccacgtgccgggcgaagacggcgtagtttcgcaggcgctgaaagaggtagttgagggtggtggcggtgtgttctgccacgaagaagtacataacccagcgtcgcaacgtggattcgttgatatcccccaaggcctcaaggcgctccatggcctcgtagaagtccacggcgaagttgaaaaactgggagttgcgcgccgacacggttaactcctcctccagaagacggatgagctcggcgacagtgtcgcgcacctcgcgctcaaaggctacaggggcctcttcttcttcttcaatctcctcttccataagggcctccccttcttcttcttctggcggcggtgggggaggggggacacggcggcgacgacggcgcaccgggaggcggtcgacaaagcgctcgatcatctccccgcggcgacggcgcatggtctcggtgacggcgcggccgttctcgcgggggcgcagttggaagacgccgcccgtcatgtcccggttatgggttggcggggggctgccatgcggcagggatacggcgctaacgatgcatctcaacaattgttgtgtaggtactccgccgccgagggacctgagcgagtccgcatcgaccggatcggaaaacctctcgagaaaggcgtctaaccagtcacagtcgcaaggtaggctgagcaccgtggcgggcggcagcgggcggcggtcggggttgtttctggcggaggtgctgctgatgatgtaattaaagtaggcggtcttgagacggcggatggtcgacagaagcaccatgtccttgggtccggcctgctgaatgcgcaggcggtcggccatgccccaggcttcgttttgacatcggcgcaggtctttgtagtagtcttgcatgagcctttctaccggcacttcttcttctccttcctcttgtcctgcatctcttgcatctatcgctgcggcggcggcggagtttggccgtaggtggcgccctcttcctcccatgcgtgtgaccccgaagcccctcatcggctgaagcagggctaggtcggcgacaacgcgctcggctaatatggcctgctgcacctgcgtgagggtagactggaagtcatccatgtccacaaagcggtggtatgcgcccgtgttgatggtgtaagtgcagttggccataacggaccagttaacggtctggtgacccggctgcgagagctcggtgtacctgagacgcgagtaagccctcgagtcaaatacgtagtcgttgcaagtccgcaccaggtactggtatcccaccaaaaagtgcggcggcggctggcggtagaggggccagcgtagggtggccggggctccgggggcgagatcttccaacataaggcgatgatatccgtagatgtacctggacatccaggtgatgccggcggcggtggtggaggcgcgcggaaagtcgcggacgcggttccagatgttgcgcagcggcaaaaagtgctccatggtcgggacgctctggccggtcaggcgcgcgcaatcgttgacgctctagaccgtgcaaaaggagagcctgtaagcgggcactcttccgtggtctggtggataaattcgcaagggtatcatggcggacgaccggggttcgagccccgtatccggccgtccgccgtgatccatgcggttaccgcccgcgtgtcgaacccaggtgtgcgacgtcagacaacgggggagtgctccttttggcttccttccaggcgcggcggctgctgcgctagcttttttggccactggccgcgcgcagcgtaagcggttaggctggaaagcgaaagcattaagtggctcgctccctgtagccggagggttattttccaagggttgagtcgcgggacccccggttcgagtctcggaccggccggactgcggcgaacgggggtttgcctccccgtcatgcaagaccccgcttgcaaattcctccggaaacagggacgagccccttttttgcttttcccagatgcatccggtgctgcggcagatgcgcccccctcctcagcagcggcaagagcaagagcagcggcagacatgcagggcaccctcccctcctcctaccgcgtcaggaggggcgacatccgcggttgacgcggcagcagatggtgattacgaacccccgcggcgccgggcccggcactacctggacttggaggagggcgagggcctggcgcggctaggagcgccctctcctgagcggtacccaagggtgcagctgaagcgtgatacgcgtgaggcgtacgtgccgcggcagaacctgtttcgcgaccgcgagggagaggagcccgaggagatgcgggatcgaaagttccacgcagggcgcgagctgcggcatggcctgaatcgcgagcggttgctgcgcgaggaggactttgagcccgacgcgcgaaccgggattagtcccgcgcgcgcacacgtggcggccgccgacctggtaaccgcatacgagcagacggtgaaccaggagattaactttcaaaaaagctttaacaaccacgtgcgtacgcttgtggcgcgcgaggaggtggctataggactgatgcatctgtgggactttgtaagcgcgctggagcaaaacccaaatagcaagccgctcatggcgcagctgttccttatagtgcagcacagcagggacaacgaggcattcagggatgcgctgctaaacatagtagagcccgagggccgctggctgctcgatttgataaacatcctgcagagcatagtggtgcaggagcgcagcttgagcctggctgacaaggtggccgccatcaactattccatgcttagcctgggcaagttttacgcccgcaagatataccataccccttacgttcccatagacaaggaggtaaagatcgaggggttctacatgcgcatggcgctgaaggtgcttaccttgagcgacgacctgggcgtttatcgcaacgagcgcatccacaaggccgtgagcgtgagccggcggcgcgagctcagcgaccgcgagctgatgcacagcctgcaaagggccctggctggcacgggcagcggcgatagagaggccgagtcctactttgacgcgggcgctgacctgcgctgggccccaagccgacgcgccctggaggcagctggggccggacctgggctggcggtggcacccgcgcgcgctggcaacgtcggcggcgtggaggaatatgacgaggacgatgagtacgagccagaggacggcgagtactaagcggtgatgtttctgatcagatgatgcaagacgcaacggacccggcggtgcgggcggcgctgcagagccagccgtccggccttaactccacggacgactggcgccaggtcatggaccgcatcatgtcgctgactgcgcgcaatcctgacgcgttccggcagcagccgcaggccaaccggctctccgcaattctggaagcggtggtcccggcgcgcgcaaaccccacgcacgagaaggtgctggcgatcgtaaacgcgctggccgaaaacagggccatccggcccgacgaggccggcctggtctacgacgcgctgcttcagcgcgtggctcgttacaacagcggcaacgtgcagaccaacctggaccggctggtgggggatgtgcgcgaggccgtggcgcagcgtgagcgcgcgcagcagcagggcaacctgggctccatggttgcactaaacgccttcctgagtacacagcccgccaacgtgccgcggggacaggaggactacaccaactttgtgagcgcactgcggctaatggtgactgagacaccgcaaagtgaggtgtaccagtctgggccagactattttttccagaccagtagacaaggcctgcagaccgtaaacctgagccaggctttcaaaaacttgcaggggctgtggggggtgcgggctcccacaggcgaccgcgcgaccgtgtctagcttgctgacgcccaactcgcgcctgttgctgctgctaatagcgcccttcacggacagtggcagcgtgtcccgggacacatacctaggtcacttgctgacactgtaccgcgaggccataggtcaggcgcatgtggacgagcatactttccaggagattacaagtgtcagccgcgcgctggggcaggaggacacgggcagcctggaggcaaccctaaactacctgctgaccaaccggcggcagaagatcccctcgttgcacagtttaaacagcgaggaggagcgcattttgcgctacgtgcagcagagcgtgagccttaacctgatgcgcgacggggtaacgcccagcgtggcgctggacatgaccgcgcgcaacatggaaccgggcatgtatgcctcaaaccggccgtttatcaaccgcctaatggactacttgcatcgcgcggccgccgtgaaccccgagtatttcaccaatgccatcttgaacccgcactggctaccgccccctggtttctacaccgggggattcgaggtgcccgagggtaacgatggattcctctgggacgacatagacgacagcgtgttttccccgcaaccgcagaccctgctagagttgcaacagcgcgagcaggcagaggcggcgctgcgaaaggaaagcttccgcaggccaagcagcttgtccgatctaggcgctgcggccccgcggtcagatgctagtagcccatttccaagcttgatagggtctcttaccagcactcgcaccacccgcccgcgcctgctgggcgaggaggagtacctaaacaactcgctgctgcagccgcagcgcgaaaaaaacctgcctccggcatttcccaacaacgggatagagagcctagtggacaagatgagtagatggaagacgtacgcgcaggagcacagggacgtgccaggcccgcgcccgcccacccgtcgtcaaaggcacgaccgtcagcggggtctggtgtgggaggacgatgactcggcagacgacagcagcgtcctggatttgggagggagtggcaacccgtttgcgcaccttcgccccaggctggggagaatgttttaaaaaaaaaaaagcatgatgcaaaataaaaaactcaccaaggccatggcaccgagcgttggttttcttgtattccccttagtatgcggcgcgcggcgatgtatgaggaaggtcctcctccctcctacgagagtgtggtgagcgcggcgccagtggcggcggcgctgggttctcccttcgatgctcccctggacccgccgtttgtgcctccgcggtacctgcggcctaccggggggagaaacagcatccgttactctgagttggcacccctattcgacaccacccgtgtgtacctggtggacaacaagtcaacggatgtggcatccctgaactaccagaacgaccacagcaactttctgaccacggtcattcaaaacaatgactacagcccgggggaggcaagcacacagaccatcaatcttgacgaccggtcgcactggggcggcgacctgaaaaccatcctgcataccaacatgccaaatgtgaacgagttcatgtttaccaataagtttaaggcgcgggtgatggtgtcgcgcttgcctactaaggacaatcaggtggagctgaaatacgagtgggtggagttcacgctgcccgagggcaactactccgagaccatgaccatagaccttatgaacaacgcgatcgtggagcactacttgaaagtgggcagacagaacggggttctggaaagcgacatcggggtaaagtttgacacccgcaacttcagactggggtttgaccccgtcactggtcttgtcatgcctggggtatatacaaacgaagccttccatccagacatcattttgctgccaggatgcggggtggacttcacccacagccgcctgagcaacttgttgggcatccgcaagcggcaacccttccaggagggctttaggatcacctacgatgatctggagggtggtaacattcccgcactgttggatgtggacgcctaccaggcgagcttgaaagatgacaccgaacagggcgggggtggcgcaggcggcagcaacagcagtggcagcggcgcggaagagaactccaacgcggcagccgcggcaatgcagccggtggaggacatgaacgatcatgccattcgcggcgacacctttgccacacgggctgaggagaagcgcgctgaggccgaagcagcggccgaagctgccgcccccgctgcgcaacccgaggtcgagaagcctcagaagaaaccggtgatcaaacccctgacagaggacagcaagaaacgcagttacaacctaataagcaatgacagcaccttcacccagtaccgcagctggtaccttgcatacaactacggcgaccctcagaccggaatccgctcatggaccctgctttgcactcctgacgtaacctgcggctcggagcaggtctactggtcgttgccagacatgatgcaagaccccgtgaccttccgctccacgcgccagatcagcaactttccggtggtgggcgccgagctgttgcccgtgcactccaagagcttctacaacgaccaggccgtctactcccaactcatccgccagtttacctctctgacccacgtgttcaatcgctttcccgagaaccagattttggcgcgcccgccagcccccaccatcaccaccgtcagtgaaaacgttcctgctctcacagatcacgggacgctaccgctgcgcaacagcatcggaggagtccagcgagtgaccattactgacgccagacgccgcacctgcccctacgtttacaaggccctgggcatagtctcgccgcgcgtcctatcgagccgcactttttgagcaagcatgtccatccttatatcgcccagcaataacacaggctggggcctgcgcttcccaagcaagatgtttggcggggccaagaagcgctccgaccaacacccagtgcgcgtgcgcgggcactaccgcgcgccctggggcgcgcacaaacgcggccgcactgggcgcaccaccgtcgatgacgccatcgacgcggtggtggaggaggcgcgcaactacacgcccacgccgccaccagtgtccacagtggacgcggccattcagaccgtggtgcgcggagcccggcgctatgctaaaatgaagagacggcggaggcgcgtagcacgtcgccaccgccgccgacccggcactgccgcccaacgcgcggcggcggccctgcttaaccgcgcacgtcgcaccggccgacgggcggccatgcgggccgctcgaaggctggccgcgggtattgtcactgtgccccccaggtccaggcgacgagcggccgccgcagcagccgcggccattagtgctatgactcagggtcgcaggggcaacgtgtattgggtgcgcgactcggttagcggcctgcgcgtgcccgtgcgcacccgccccccgcgcaactagattgcaagaaaaaactacttagactcgtactgttgtatgtatccagcggcggcggcgcgcaacgaagctatgtccaagcgcaaaatcaaagaagagatgctccaggtcatcgcgccggagatctatggccccccgaagaaggaagagcaggattacaagccccgaaagctaaagcgggtcaaaaagaaaaagaaagatgatgatgatgaacttgacgacgaggtggaactgctgcacgctaccgcgcccaggcgacgggtacagtggaaaggtcgacgcgtaaaacgtgttttgcgacccggcaccaccgtagtctttacgcccggtgagcgctccacccgcacctacaagcgcgtgtatgatgaggtgtacggcgacgaggacctgcttgagcaggccaacgagcgcctcggggagtttgcctacggaaagcggcataaggacatgctggcgttgccgctggacgagggcaacccaacacctagcctaaagcccgtaacactgcagcaggtgctgcccgcgcttgcaccgtccgaagaaaagcgcggcctaaagcgcgagtctggtgacttggcacccaccgtgcagctgatggtacccaagcgccagcgactggaagatgtcttggaaaaaatgaccgtggaacctgggctggagcccgaggtccgcgtgcggccaatcaagcaggtggcgccgggactgggcgtgcagaccgtggacgttcagatacccactaccagtagcaccagtattgccaccgccacagagggcatggagacacaaacgtccccggttgcctcagcggtggcggatgccgcggtgcaggcggtcgctgcggccgcgtccaagacctctacggaggtgcaaacggacccgtggatgtttcgcgtttcagccccccggcgcccgcgcggttcgaggaagtacggcgccgccagcgcgctactgcccgaatatgccctacatccttccattgcgcctacccccggctatcgtggctacacctaccgccccagaagacgagcaactacccgacgccgaaccaccactggaacccgccgccgccgtcgccgtcgccagcccgtgctggccccgatttccgtgcgcagggtggctcgcgaaggaggcaggaccctggtgctgccaacagcgcgctaccaccccagcatcgtttaaaagccggtctttgtggttcttgcagatatggccctcacctgccgcctccgtttcccggtgccgggattccgaggaagaatgcaccgtaggaggggcatggccggccacggcctgacgggcggcatgcgtcgtgcgcaccaccggcggcggcgcgcgtcgcaccgtcgcatgcgcggcggtatcctgcccctccttattccactgatcgccgcggcgattggcgccgtgcccggaattgcatccgtggccttgcaggcgcagagacactgattaaaaacaagttgcatgtggaaaaatcaaaataaaaagtctggactctcacgctcgcttggtcctgtaactattttgtagaatggaagacatcaactttgcgtctctggccccgcgacacggctcgcgcccgttcatgggaaactggcaagatatcggcaccagcaatatgagcggtggcgccttcagctggggctcgctgtggagcggcattaaaaatttcggttccaccgttaagaactatggcagcaaggcctggaacagcagcacaggccagatgctgagggataagttgaaagagcaaaatttccaacaaaaggtggtagatggcctggcctctggcattagcggggtggtggacctggccaaccaggcagtgcaaaataagattaacagtaagcttgatccccgccctcccgtagaggagcctccaccggccgtggagacagtgtctccagaggggcgtggcgaaaagcgtccgcgccccgacagggaagaaactctggtgacgcaaatagacgagcctccctcgtacgaggaggcactaaagcaaggcctgcccaccacccgtcccatcgcgcccatggctaccggagtgctgggccagcacacacccgtaacgctggacctgcctccccccgccgacacccagcagaaacctgtgctgccaggcccgaccgccgttgttgtaacccgtcctagccgcgcgtccctgcgccgcgccgccagcggtccgcgatcgttgcggcccgtagccagtggcaactggcaaagcacactgaacagcatcgtgggtctgggggtgcaatccctgaagcgccgacgatgcttctgaatagctaacgtgtcgtatgtgtgtcatgtatgcgtccatgtcgccgccagaggagctgctgagccgccgcgcgcccgctttccaagatggctaccccttcgatgatgccgcagtggtcttacatgcacatctcgggccaggacgcctcggagtacctgagccccgggctggtgcagtttgcccgcgccaccgagacgtacttcagcctgaataacaagtttagaaaccccacggtggcgcctacgcacgacgtgaccacagaccggtcccagcgtttgacgctgcggttcatccctgtggaccgtgaggatactgcgtactcgtacaaggcgcggttcaccctagctgtgggtgataaccgtgtgctggacatggcttccacgtactttgacatccgcggcgtgctggacaggggccctacttttaagccctactctggcactgcctacaacgccctggctcccaagggtgccccaaatccttgcgaatgggatgaagctgctactgctcttgaaataaacctagaagaagaggacgatgacaacgaagacgaagtagacgagcaagctgagcagcaaaaaactcacgtatttgggcaggcgccttattctggtataaatattacaaaggagggtattcaaataggtgtcgaaggtcaaacacctaaatatgccgataaaacatttcaacctgaacctcaaataggagaatctcagtggtacgaaactgaaattaatcatgcagctgggagagtccttaaaaagactaccccaatgaaaccatgttacggttcatatgcaaaacccacaaatgaaaatggagggcaaggcattcttgtaaagcaacaaaatggaaagctagaaagtcaagtggaaatgcaatttttctcaactactgaggcgaccgcaggcaatggtgataacttgactcctaaagtggtattgtacagtgaagatgtagatatagaaaccccagacactcatatttcttacatgcccactattaaggaaggtaactcacgagaactaatgggccaacaatctatgcccaacaggcctaattacattgcttttagggacaattttattggtctaatgtattacaacagcacgggtaatatgggtgttctggcgggccaagcatcgcagttgaatgctgttgtagatttgcaagacagaaacacagagctttcataccagcttttgcttgattccattggtgatagaaccaggtacttttctatgtggaatcaggctgttgacagctatgatccagatgttagaattattgaaaatcatggaactgaagatgaacttccaaattactgctttccactgggaggtgtgattaatacagagactcttaccaaggtaaaacctaaaacaggtcaggaaaatggatgggaaaaagatgctacagaattttcagataaaaatgaaataagagttggaaataattttgccatggaaatcaatctaaatgccaacctgtggagaaatttcctgtactccaacatagcgctgtatttgcccgacaagctaaagtacagtccttccaacgtaaaaatttctgataacccaaacacctacgactacatgaacaagcgagtggtggctcccgggttagtggactgctacattaaccttggagcacgctggtcccttgactatatggacaacgtcaacccatttaaccaccaccgcaatgctggcctgcgctaccgctcaatgttgctgggcaatggtcgctatgtgcccttccacatccaggtgcctcagaagttctttgccattaaaaacctccttctcctgccgggctcatacacctacgagtggaacttcaggaaggatgttaacatggttctgcagagctccctaggaaatgacctaagggttgacggagccagcattaagtttgatagcatttgcctttacgccaccttcttccccatggcccacaacaccgcctccacgcttgaggccatgcttagaaacgacaccaacgaccagtcctttaacgactatctctccgccgccaacatgctctaccctatacccgccaacgctaccaacgtgcccatatccatcccctcccgcaactgggcggctttccgcggctgggccttcacgcgccttaagactaaggaaaccccatcactgggctcgggctacgacccttattacacctactctggctctataccctacctagatggaaccttttacctcaaccacacctttaagaaggtggccattacctttgactcttctgtcagctggcctggcaatgaccgcctgcttacccccaacgagtttgaaattaagcgctcagttgacggggagggttacaacgttgcccagtgtaacatgaccaaagactggttcctggtacaaatgctagctaactacaacattggctaccagggcttctatatcccagagagctacaaggaccgcatgtactccttctttagaaacttccagcccatgagccgtcaggtggtggatgatactaaatacaaggactaccaacaggtgggcatcctacaccaacacaacaactctggatttgttggctaccttgcccccaccatgcgcgaaggacaggcctaccctgctaacttcccctatccgcttataggcaagaccgcagttgacagcattacccagaaaaagtttctttgcgatcgcaccctttggcgcatcccattctccagtaactttatgtccatgggcgcactcacagacctgggccaaaaccttctctacgccaactccgcccacgcgctagacatgacttttgaggtggatcccatggacgagcccacccttctttatgttttgtttgaagtctttgacgtggtccgtgtgcaccggccgcaccgcggcgtcatcgaaaccgtgtacctgcgcacgcccttctcggccggcaacgccacaacataaagaagcaagcaacatcaacaacagctgccgccatgggctccagtgagcaggaactgaaagccattgtcaaagatcttggttgtgggccatattttttgggcacctatgacaagcgctttccaggctttgtttctccacacaagctcgcctgcgccatagtcaatacggccggtcgcgagactgggggcgtacactggatggcctttgcctggaacccgcactcaaaaacatgctacctctttgagccctttggcttttctgaccagcgactcaagcaggtttaccagtttgagtacgagtcactcctgcgccgtagcgccattgcttcttcccccgaccgctgtataacgctggaaaagtccacccaaagcgtacaggggcccaactcggccgcctgtggactattctgctgcatgtttctccacgcctttgccaactggccccaaactcccatggatcacaaccccaccatgaaccttattaccggggtacccaactccatgctcaacagtccccaggtacagcccaccctgcgtcgcaaccaggaacagctctacagcttcctggagcgccactcgccctacttccgcagccacagtgcgcagattaggagcgccacttctttttgtcacttgaaaaacatgtaaaaataatgtactagagacactttcaataaaggcaaatgcttttatttgtacactctcgggtgattatttacccccacccttgccgtctgcgccgtttaaaaatcaaaggggttctgccgcgcatcgctatgcgccactggcagggacacgttgcgatactggtgtttagtgctccacttaaactcaggcacaaccatccgcggcagctcggtgaagttttcactccacaggctgcgcaccatcaccaacgcgtttagcaggtcgggcgccgatatcttgaagtcgcagttggggcctccgccctgcgcgcgcgagttgcgatacacagggttgcagcactggaacactatcagcgccgggtggtgcacgctggccagcacgctcttgtcggagatcagatccgcgtccaggtcctccgcgttgctcagggcgaacggagtcaactttggtagctgccttcccaaaaagggcgcgtgcccaggctttgagttgcactcgcaccgtagtggcatcaaaaggtgaccgtgcccggtctgggcgttaggatacagcgcctgcataaaagccttgatctgcttaaaagccacctgagcctttgcgccttcagagaagaacatgccgcaagacttgccggaaaactgattggccggacaggccgcgtcgtgcacgcagcaccttgcgtcggtgttggagatctgcaccacatttcggccccaccggttcttcacgatcttggccttgctagactgctccttcagcgcgcgctgcccgttttcgctcgtcacatccatttcaatcacgtgctccttatttatcataatgcttccgtgtagacacttaagctcgccttcgatctcagcgcagcggtgcagccacaacgcgcagcccgtgggctcgtgatgcttgtaggtcacctctgcaaacgactgcaggtacgcctgcaggaatcgccccatcatcgtcacaaaggtcttgttgctggtgaaggtcagctgcaacccgcggtgctcctcgttcagccaggtcttgcatacggccgccagagcttccacttggtcaggcagtagtttgaagttcgcctttagatcgttatccacgtggtacttgtccatcagcgcgcgcgcagcctccatgcccttctcccacgcagacacgatcggcacactcagcgggttcatcaccgtaatttcactttccgcttcgctgggctcttcctcttcctcttgcgtccgcataccacgcgccactgggtcgtcttcattcagccgccgcactgtgcgcttacctcctttgccatgcttgattagcaccggtgggttgctgaaacccaccatttgtagcgccacatcttctctttcttcctcgctgtccacgattacctctggtgatggcgggcgctcgggcttgggagaagggcgcttctttttcttcttgggcgcaatggccaaatccgccgccgaggtcgatggccgcgggctgggtgtgcgcggcaccagcgcgtcttgtgatgagtcttcctcgtcctcggactcgatacgccgcctcatccgcttttttgggggcgcccggggaggcggcggcgacggggacggggacgacacgtcctccatggttgggggacgtcgcgccgcaccgcgtccgcgctcgggggtggtttcgcgctgctcctcttcccgactggccatttccttctcctataggcagaaaaagatcatggagtcagtcgagaagaaggacagcctaaccgccccctctgagttcgccaccaccgcctccaccgatgccgccaacgcgcctaccaccttccccgtcgaggcacccccgcttgaggaggaggaagtgattatcgagcaggacccaggttttgtaagcgaagacgacgaggaccgctcagtaccaacagaggataaaaagcaagaccaggacaacgcagaggcaaacgaggaacaagtcgggcggggggacgaaaggcatggcgactacctagatgtgggagacgacgtgctgttgaagcatctgcagcgccagtgcgccattatctgcgacgcgttgcaagagcgcagcgatgtgcccctcgccatagcggatgtcagccttgcctacgaacgccacctattctcaccgcgcgtaccccccaaacgccaagaaaacggcacatgcgagcccaacccgcgcctcaacttctaccccgtatttgccgtgccagaggtgcttgccacctatcacatctttttccaaaactgcaagatacccctatcctgccgtgccaaccgcagccgagcggacaagcagctggccttgcggcagggcgctgtcatacctgatatcgcctcgctcaacgaagtgccaaaaatctttgagggtcttggacgcgacgagaagcgcgcggcaaacgctctgcaacaggaaaacagcgaaaatgaaagtcactctggagtgttggtggaactcgagggtgacaacgcgcgcctagccgtactaaaacgcagcatcgaggtcacccactttgcctacccggcacttaacctaccccccaaggtcatgagcacagtcatgagtgagctgatcgtgcgccgtgcgcagcccctggagagggatgcaaatttgcaagaacaaacagaggagggcctacccgcagttggcgacgagcagctagcgcgctggcttcaaacgcgcgagcctgccgacttggaggagcgacgcaaactaatgatggccgcagtgctcgttaccgtggagcttgagtgcatgcagcggttctttgctgacccggagatgcagcgcaagctagaggaaacattgcactacacctttcgacagggctacgtacgccaggcctgcaagatctccaacgtggagctctgcaacctggtctcctaccttggaattttgcacgaaaaccgccttgggcaaaacgtgcttcattccacgctcaagggcgaggcgcgccgcgactacgtccgcgactgcgtttacttatttctatgctacacctggcagacggccatgggcgtttggcagcagtgcttggaggagtgcaacctcaaggagctgcagaaactgctaaagcaaaacttgaaggacctatggacggccttcaacgagcgctccgtggccgcgcacctggcggacatcattttccccgaacgcctgcttaaaaccctgcaacagggtctgccagacttcaccagtcaaagcatgttgcagaactttaggaactttatcctagagcgctcaggaatcttgcccgccacctgctgtgcacttcctagcgactttgtgcccattaagtaccgcgaatgccctccgccgctttggggccactgctaccttctgcagctagccaactaccttgcctaccactctgacataatggaagacgtgagcggtgacggtctactggagtgtcactgtcgctgcaacctatgcaccccgcaccgctccctggtttgcaattcgcagctgcttaacgaaagtcaaattatcggtacctttgagctgcagggtccctcgcctgacgaaaagtccgcggctccggggttgaaactcactccggggctgtggacgtcggcttaccttcgcaaatttgtacctgaggactaccacgcccacgagattaggttctacgaagaccaatcccgcccgccaaatgcggagcttaccgcctgcgtcattacccagggccacattcttggccaattgcaagccatcaacaaagcccgccaagagtttctgctacgaaagggacggggggtttacttggacccccagtccggcgaggagctcaacccaatccccccgccgccgcagccctatcagcagcagccgcgggcccttgcttcccaggatggcacccaaaaagaagctgcagctgccgccgccacccacggacgaggaggaatactgggacagtcaggcagaggaggttttggacgaggaggaggaggacatgatggaagactgggagagcctagacgaggaagcttccgaggtcgaagaggtgtcagacgaaacaccgtcaccctcggtcgcattcccctcgccggcgccccagaaatcggcaaccggttccagcatggctacaacctccgctcctcaggcgccgccggcactgcccgttcgccgacccaaccgtagatgggacaccactggaaccagggccggtaagtccaagcagccgccgccgttagcccaagagcaacaacagcgccaaggctaccgctcatggcgcgggcacaagaacgccatagttgcttgcttgcaagactgtgggggcaacatctccttcgcccgccgctttcttctctaccatcacggcgtggccttcccccgtaacatcctgcattactaccgtcatctctacagcccatactgcaccggcggcagcggcagcggcagcaacagcagcggccacacagaagcaaaggcgaccggatagcaagactctgacaaagcccaagaaatccacagcggcggcagcagcaggaggaggagcgctgcgtctggcgcccaacgaacccgtatcgacccgcgagcttagaaacaggatttttcccactctgtatgctatatttcaacagagcaggggccaagaacaagagctgaaaataaaaaacaggtctctgcgatccctcacccgcagctgcctgtatcacaaaagcgaagatcagcttcggcgcacgctggaagacgcggaggctctcttcagtaaatactgcgcgctgactcttaaggactagtttcgcgccctttctcaaatttaagcgcgaaaactacgtcatctccagcggccacacccggcgccagcacctgtcgtcagcgccattatgagcaaggaaattcccacgccctacatgtggagttaccagccacaaatgggacttgcggctggagctgcccaagactactcaacccgaataaactacatgagcgcgggaccccacatgatatcccgggtcaacggaatccgcgcccaccgaaaccgaattctcttggaacaggcggctattaccaccacacctcgtaataaccttaatccccgtagttggcccgctgccctggtgtaccaggaaagtcccgctcccaccactgtggtacttcccagagacgcccaggccgaagttcagatgactaactcaggggcgcagcttgcgggcggctttcgtcacagggtgcggtcgcccgggcagggtataactcacctgacaatcagagggcgaggtattcagctcaacgacgagtcggtgagctcctcgcttggtctccgtccggacgggacatttcagatcggcggcgccggccgtccttcattcacgcctcgtcaggcaatcctaactctgcagacctcgtcctctgagccgcgctctggaggcattggaactctgcaatttattgaggagtttgtgccatcggtctactttaaccccttctcgggacctcccggccactatccggatcaatttattcctaactttgacgcggtaaaggactcggcggacggctacgactgaatgttaagtggagaggcagagcaactgcgcctgaaacacctggtccactgtcgccgccacaagtgctttgcccgcgactccggtgagttttgctactttgaattgcccgaggatcatatcgagggcccggcgcacggcgtccggcttaccgcccagggagagcttgcccgtagcctgattcgggagtttacccagcgccccctgctagttgagcgggacaggggaccctgtgttctcactgtgatttgcaactgtcctaaccttggattacatcaagatctttgttgccatctctgtgctgagtataataaatacagaaattaaaatatactggggctcctatcgccatcctgtaaacgccaccgtcttcacccgcccaagcaaaccaaggcgaaccttacctggtacttttaacatctctccctctgtgatttacaacagtttcaacccagacggagtgagtctacgagagaacctctccgagctcagctactccatcagaaaaaacaccaccctccttacctgccgggaacgtacgagtgcgtcaccggccgctgcaccacacctaccgcctgaccgtaaaccagactttttccggacagacctcaataactctgtttaccagaacaggaggtgagcttagaaaacccttagggtattaggccaaaggcgcagctactgtggggtttatgaacaattcaagcaactctacgggctattctaattcaggtttctctagaatcggggttggggttattctctgtcttgtgattctctttattcttatactaacgcttctctgcctaaggctcgccgcctgctgtgtgcacatttgcatttattgtcagctttttaaacgctggggtcgccacccaagatgattaggtacataatcctaggtttactcacccttgcgtcagcccacggtaccacccaaaaggtggattttaaggagccagcctgtaatgttacattcgcagctgaagctaatgagtgcaccactcttataaaatgcaccacagaacatgaaaagctgcttattcgccacaaaaacaaaattggcaagtatgctgtttatgctatttggcagccaggtgacactacagagtataatgttacagttttccagggtaaaagtcataaaacttttatgtatacttttccattttatgaaatgtgcgacattaccatgtacatgagcaaacagtataagttgtggcccccacaaaattgtgtggaaaacactggcactttctgctgcactgctatgctaattacagtgctcgctttggtctgtaccctactctatattaaatacaaaagcagacgcagctttattgaggaaaagaaaatgccttaatttactaagttacaaagctaatgtcaccactaactgctttactcgctgcttgcaaaacaaattcaaaaagttagcattataattagaataggatttaaaccccccggtcatttcctgctcaataccattcccctgaacaattgactctatgtgggatatgctccagcgctacaaccttgaagtcaggcttcctggatgtcagcatctgactttggccagcacctgtcccgcggatttgttccagtccaactacagcgacccaccctaacagagatgaccaacacaaccaacgcggccgccgctaccggacttacatctaccacaaatacaccccaagtttctgcctttgtcaataactgggataacttgggcatgtggtggttctccatagcgcttatgtttgtatgccttattattatgtggctcatctgctgcctaaagcgcaaacgcgcccgaccacccatctatagtcccatcattgtgctacacccaaacaatgatggaatccatagattggacggactgaaacacatgttcttttctcttacagtatgattaaatgagacatgattcctcgagtttttatattactgacccttgttgcgcttttttgtgcgtgctccacattggctgcggtttctcacatcgaagtagactgcattccagccttcacagtctatttgctttacggatttgtcaccctcacgctcatctgcagcctcatcactgtggtcatcgcctttatccagtgcattgactgggtctgtgtgcgctttgcatatctcagacaccatccccagtacagggacaggactatagctgagcttcttagaattctttaattatgaaatttactgtgacttttctgctgattatttgcaccctatctgcgttttgttccccgacctccaagcctcaaagacatatatcatgcagattcactcgtatatggaatattccaagttgctacaatgaaaaaagcgatctttccgaagcctggttatatgcaatcatctctgttatggtgttctgcagtaccatcttagccctagctatatatccctaccttgacattggctggaaacgaatagatgccatgaaccacccaactttccccgcgcccgctatgcttccactgcaacaagttgttgccggcggctttgtcccagccaatcagcctcgccccacttctcccacccccactgaaatcagctactttaatctaacaggaggagatgactgacaccctagatctagaaatggacggaattattacagagcagcgcctgctagaaagacgcagggcagcggccgagcaacagcgcatgaatcaagagctccaagacatggttaacttgcaccagtgcaaaaggggtatcttttgtctggtaaagcaggccaaagtcacctacgacagtaataccaccggacaccgccttagctacaagttgccaaccaagcgtcagaaattggtggtcatggtgggagaaaagcccattaccataactcagcactcggtagaaaccgaaggctgcattcactcaccttgtcaaggacctgaggatctctgcacccttattaagaccctgtgcggtctcaaagatcttattccctttaactaataaaaaaaaataataaagcatcacttacttaaaatcagttagcaaatttctgtccagtttattcagcagcacctccttgccctcctcccagctctggtattgcagcttcctcctggctgcaaactttctccacaatctaaatggaatgtcagtttcctcctgttcctgtccatccgcacccactatcttcatgttgttgcagatgaagcgcgcaagaccgtctgaagataccttcaaccccgtgtatccatatgacacggaaaccggtcctccaactgtgccttttcttactcctccctttgtatcccccaatgggtttcaagagagtccccctggggtactctctttgcgcctatccgaacctctagttacctccaatggcatgcttgcgctcaaaatgggcaacggcctctctctggacgaggccggcaaccttacctcccaaaatgtaaccactgtgagcccacctctcaaaaaaaccaagtcaaacataaacctggaaatatctgcacccctcacagttacctcagaagccctaactgtggctgccgccgcacctctaatggtcgcgggcaacacactcaccatgcaatcacaggccccgctaaccgtgcacgactccaaacttagcattgccacccaaggacccctcacagtgtcagaaggaaagctagccctgcaaacatcaggccccctcaccaccaccgatagcagtacccttactatcactgcctcaccccctctaactactgccactggtagcttgggcattgacttgaaagagcccatttatacacaaaatggaaaactaggactaaagtacggggctcctttgcatgtaacagacgacctaaacactttgaccgtagcaactggtccaggtgtgactattaataatacttccttgcaaactaaagttactggagccttgggttttgattcacaaggcaatatgcaacttaatgtagcaggaggactaaggattgattctcaaaacagacgccttatacttgatgttagttatccgtttgatgctcaaaaccaactaaatctaagactaggacagggccctctttttataaactcagcccacaacttggatattaactacaacaaaggcctttacttgtttacagcttcaaacaattccaaaaagcttgaggttaacctaagcactgccaaggggttgatgtttgacgctacagccatagccattaatgcaggagatgggcttgaatttggttcacctaatgcaccaaacacaaatcccctcaaaacaaaaattggccatggcctagaatttgattcaaacaaggctatggttcctaaactaggaactggccttagttttgacagcacaggtgccattacagtaggaaacaaaaataatgataagctaactttgtggaccacaccagctccatctcctaactgtagactaaatgcagagaaagatgctaaactcactttggtcttaacaaaatgtggcagtcaaatacttgctacagtttcagttttggctgttaaaggcagtttggctccaatatctggaacagttcaaagtgctcatcttattataagatttgacgaaaatggagtgctactaaacaattccttcctggacccagaatattggaactttagaaatggagatcttactgaaggcacagcctatacaaacgctgttggatttatgcctaacctatcagcttatccaaaatctcacggtaaaactgccaaaagtaacattgtcagtcaagtttacttaaacggagacaaaactaaacctgtaacactaaccattacactaaacggtacacaggaaacaggagacacaactccaagtgcatactctatgtcattttcatgggactggtctggccacaactacattaatgaaatatttgccacatcctcttacacttttt

SEQ ID NO: 2001-2009 - skipped (9 entries)

SEQ ID NO: 2010 - DNA, 3415 bp, synthetic construct
  misc_feature 1..3415: note = pALD-X80, Ad5 Region VA-RNA
  source 1..3415: mol_type = other DNA
tcgacagaagcaccatgtccttgggtccggcctgctgaatgcgcaggcggtcggccatgccccaggcttcgttttgacatcggcgcaggtctttgtagtagtcttgcatgagcctttctaccggcacttcttcttctccttcctcttgtcctgcatctcttgcatctatcgctgcggcggcggcggagtttggccgtaggtggcgccctcttcctcccatgcgtgtgaccccgaagcccctcatcggctgaagcagggctaggtcggcgacaacgcgctcggctaatatggcctgctgcacctgcgtgagggtagactggaagtcatccatgtccacaaagcggtggtatgcgcccgtgttgatggtgtaagtgcagttggccataacggaccagttaacggtctggtgacccggctgcgagagctcggtgtacctgagacgcgagtaagccctcgagtcaaatacgtagtcgttgcaagtccgcaccaggtactggtatcccaccaaaaagtgcggcggcggctggcggtagaggggccagcgtagggtggccggggctccgggggcgagatcttccaacataaggcgatgatatccgtagatgtacctggacatccaggtgatgccggcggcggtggtggaggcgcgcggaaagtcgcggacgcggttccagatgttgcgcagcggcaaaaagtgctccatggtcgggacgctctggccggtcaggcgcgcgcaatcgttgacgctctagcgtgcaaaaggagagcctgtaagcgggcactcttccgtggtctggtggataaattcgcaagggtatcatggcggacgaccggggttcgagccccgtatccggccgtccgccgtgatccatgcggttaccgcccgcgtgtcgaacccaggtgtgcgacgtcagacaacgggggagtgctccttttggcttccttccaggcgcggcggctgctgcgctagcttttttggccactggccgcgcgcagcgtaagcggttaggctggaaagcgaaagcattaagtggctcgctccctgtagccggagggttattttccaagggttgagtcgcgggacccccggttcgagtctcggaccggccggactgcggcgaacgggggtttgcctccccgtcatgcaagaccccgcttgcaaattcctccggaaacagggacgagccccttttttgcttttcccagatgcatccggtgctgcggcagatgcgcccccctcctcagcagcggcaagagcaagagcagcggcagacatgcagggcaccctcccctcctcctaccgcgtcaggaggggcgacatccgcggttgacgcggcagcagatggtgattacgaacccccgcggcgccgggcccggcactacctggacttggaggagggcgagggcctggcgcggctaggagcgccctctcctgagcggcacccaagggtgcagctgaagcgtgatacgcgtgaggcgtacgtgccgcggcagaacctgtttcgcgaccgcgagggagaggagcccgaggagatgcgggatcgaaagttccacgcagggcgcgagctgcggcatggcctgaatcgcgagcggttgctgcgcgaggaggactttgagcccgacgcgcgaaccgggattagtcccgcgcgcgcacacgtggcggccgccgacctggtaaccgcatacgagcagacggtgaaccaggagattaactttcaaaaaagctttaacaaccacgtgcgtacgcttgtggcgcgcgaggaggtggctataggactgatgcatctgtgggactttgtaagcgcgctggagcaaaacccaaatagcaagccgctcatggcgcagctgttccttatagtgcagcacagcagggacaacgaggcattcagggatgcgctgctaaacatagtagagcccgagggccgctggctgctcgatttgataaacatcctgcagagcatagtggtgcaggagcgcagcttgagcctggctgacaaggtggccgccatcaactattccatgcttagcctgggcaagttttacgcccgcaagatataccataccccttacgttcccatagacaaggaggtaaagatcgaggggttctacatgcgcatggcgctgaaggtgcttaccttgagcgacgacctgggcgtttatcgcaacgagcgcatccacaaggccgtgagcgtgagccggcggcgcgagctcagcgaccgcgagctgatgcacagcctgcaaagggccctggctggcacgggcagcggcgatagagaggccgagtcctactttgacgcgggcgctgacctgcgctgggccccaagccgacgcgccctggaggcagctggggccggacctgggctggcggtggcacccgcgcgcgctggcaacgtcggcggcgtggaggaatatgacgaggacgatgagtacgagccagaggacggcgagtactaagcggtgatgtttctgatcagatgatgcaagacgcaacggacccggcggtgcgggcggcgctgcagagccagccgtccggccttaactccacggacgactggcgccaggtcatggaccgcatcatgtcgctgactgcgcgcaatcctgacgcgttccggcagcagccgcaggccaaccggctctccgcaattctggaagcggtggtcccggcgcgcgcaaaccccacgcacgagaaggtgctggcgatcgtaaacgcgctggccgaaaacagggccatccggcccgacgaggccggcctggtctacgacgcgctgcttcagcgcgtggctcgttacaacagcggcaacgtgcagaccaacctggaccggctggtgggggatgtgcgcgaggccgtggcgcagcgtgagcgcgcgcagcagcagggcaacctgggctccatggttgcactaaacgccttcctgagtacacagcccgccaacgtgccgcggggacaggaggactacaccaactttgtgagcgcactgcggctaatggtgactgagacaccgcaaagtgaggtgtaccagtctgggccagactattttttccagaccagtagacaaggcctgcagaccgtaaacctgagccaggctttcaaaaacttgcaggggctgtggggggtgcgggctcccacaggcgaccgcgcgaccgtgtctagcttgctgacgcccaactcgcgcctgttgctgctgctaatagcgcccttcacggacagtggcagcgtgtcccgggacacatacctaggtcacttgctgacactgtaccgcgaggccataggtcaggcgcatgtggacgagcatactttccaggagattacaagtgtcagccgcgcgctggggcaggaggacacgggcagcctggaggcaaccctaaactacctgctgaccaaccggcggcagaagatcccctcgttgcacagttt

SEQ ID NO: 2011 - DNA, 157 bp, synthetic construct
  misc_feature 1..157: note = Ad5 VA-RNA region (VA RNA I)
  source 1..157: mol_type = other DNA
gggcactcttccgtggtctggtggataaattcgcaagggtatcatggcggacgaccggggttcgagccccgtatccggccgtccgccgtgatccatgcggttaccgcccgcgtgtcgaacccaggtgtgcgacgtcagacaacgggggagtgctcct

SEQ ID NO: 2012 - DNA, 158 bp, synthetic construct
  misc_feature 1..158: note = Ad5 VA-RNA region (VA RNA II)
  source 1..158: mol_type = other DNA
ggctcgctccctgtagccggagggttattttccaagggttgagtcgcgggacccccggttcgagtctcggaccggccggactgcggcgaacgggggtttgcctccccgtcatgcaagaccccgcttgcaaattcctccggaaacagggacgagcccct

SEQ ID NO: 2013-2019 - skipped (7 entries)

SEQ ID NO: 2020 - DNA, 6688 bp, synthetic construct
  misc_feature 1..6688: note = pALD-X80, Ad5 Region E2
  source 1..6688: mol_type = other DNA
gcaccctttggcgcatcccattctccagtaactttatgtccatgggcgcactcacagacctgggccaaaaccttctctacgccaactccgcccacgcgctagacatgacttttgaggtggatcccatggacgagcccacccttctttatgttttgtttgaagtctttgacgtggtccgtgtgcaccagccgcaccgcggcgtcatcgaaaccgtgtacctgcgcacgcccttctcggccggcaacgccacaacataaagaagcaagcaacatcaacaacagctgccgccatgggctccagtgagcaggaactgaaagccattgtcaaagatcttggttgtgggccatattttttgggcacctatgacaagcgctttccaggctttgtttctccacacaagctcgcctgcgccatagtcaatacggccggtcgcgagactgggggcgtacactggatggcctttgcctggaacccgcactcaaaaacatgctacctctttgagccctttggcttttctgaccagcgactcaagcaggtttaccagtttgagtacgagtcactcctgcgccgtagcgccattgcttcttcccccgaccgctgtataacgctggaaaagtccacccaaagcgtacaggggcccaactcggccgcctgtggactattctgctgcatgtttctccacgcctttgccaactggccccaaactcccatggatcacaaccccaccatgaaccttattaccggggtacccaactccatgctcaacagtccccaggtacagcccaccctgcgtcgcaaccaggaacagctctacagcttcctggagcgccactcgccctacttccgcagccacagtgcgcagattaggagcgccacttctttttgtcacttgaaaaacatgtaaaaataatgtactagagacactttcaataaaggcaaatgcttttatttgtacactctcgggtgattatttacccccacccttgccgtctgcgccgtttaaaaatcaaaggggttctgccgcgcatcgctatgcgccactggcagggacacgttgcgatactggtgtttagtgctccacttaaactcaggcacaaccatccgcggcagctcggtgaagttttcactccacaggctgcgcaccatcaccaacgcgtttagcaggtcgggcgccgatatcttgaagtcgcagttggggcctccgccctgcgcgcgcgagttgcgatacacagggttgcagcactggaacactatcagcgccgggtggtgcacgctggccagcacgctcttgtcggagatcagatccgcgtccaggtcctccgcgttgctcagggcgaacggagtcaactttggtagctgccttcccaaaaagggcgcgtgcccaggctttgagttgcactcgcaccgtagtggcatcaaaaggtgaccgtgcccggtctgggcgttaggatacagcgcctgcataaaagccttgatctgcttaaaagccacctgagcctttgcgccttcagagaagaacatgccgcaagacttgccggaaaactgattggccggacaggccgcgtcgtgcacgcagcaccttgcgtcggtgttggagatctgcaccacatttcggccccaccggttcttcacgatcttggccttgctagactgctccttcagcgcgcgctgcccgttttcgctcgtcacatccatttcaatcacgtgctccttatttatcataatgcttccgtgtagacacttaagctcgccttcgatctcagcgcagcggtgcagccacaacgcgcagcccgtgggctcgtgatgcttgtaggtcacctctgcaaacgactgcaggtacgcctgcaggaatcgccccatcatcgtcacaaaggtcttgttgctggtgaaggtcagctgcaacccgcggtgctcctcgttcagccaggtcttgcatacggccgccagagcttccacttggtcaggcagtagtttgaagttcgcctttagatcgttatccacgtggtacttgtccatcagcgcgcgcgcagcctccatgcccttctcccacgcagacacgatcggcacactcagcgggttcatcaccgtaatttcactttccgcttcgctgggctcttcctcttcctcttgcgtccgcataccacgcgccactgggtcgtcttcattcagccgccgcactgtgcgcttacctcctttgccatgcttgattagcaccggtgggttgctgaaacccaccatttgtagcgccacatcttctctttcttcctcgctgtccacgattacctctggtgatggcgggcgctcgggcttgggagaagggcgcttctttttcttcttgggcgcaatggccaaatccgccgccgaggtcgatggccgcgggctgggtgtgcgcggcaccagcgcgtcttgtgatgagtcttcctcgtcctcggactcgatacgccgcctcatccgcttttttgggggcgcccggggaggcggcggcgacggggacggggacgacacgtcctccatggttgggggacgtcgcgccgcaccgcgtccgcgctcgggggtggtttcgcgctgctcctcttcccgactggccatttccttctcctataggcagaaaaagatcatggagtcagtcgagaagaaggacagcctaaccgccccctctgagttcgccaccaccgcctccaccgatgccgccaacgcgcctaccaccttccccgtcgaggcacccccgcttgaggaggaggaagtgattatcgagcaggacccaggttttgtaagcgaagacgacgaggaccgctcagtaccaacagaggataaaaagcaagaccaggacaacgcagaggcaaacgaggaacaagtcgggcggggggacgaaaggcatggcgactacctagatgtgggagacgacgtgctgttgaagcatctgcagcgccagtgcgccattatctgcgacgcgttgcaagagcgcagcgatgtgcccctcgccatagcggatgtcagccttgcctacgaacgccacctattctcaccgcgcgtaccccccaaacgccaagaaaacggcacatgcgagcccaacccgcgcctcaacttctaccccgtatttgccgtgccagaggtgcttgccacctatcacatctttttccaaaactgcaagatacccctatcctgccgtgccaaccgcagccgagcggacaagcagctggccttgcggcagggcgctgtcatacctgatatcgcctcgctcaacgaagtgccaaaaatctttgagggtcttggacgcgacgagaagcgcgcggcaaacgctctgcaacaggaaaacagcgaaaatgaaagtcactctggagtgttggtggaactcgagggtgacaacgcgcgcctagccgtactaaaacgcagcatcgaggtcacccactttgcctacccggcacttaacctaccccccaaggtcatgagcacagtcatgagtgagctgatcgtgcgccgtgcgcagcccctggagagggatgcaaatttgcaagaacaaacagaggagggcctacccgcagttggcgacgagcagctagcgcgctggcttcaaacgcgcgagcctgccgacttggaggagcgacgcaaactaatgatggccgcagtgctcgttaccgtggagcttgagtgcatgcagcggttctttgctgacccggagatgcagcgcaagctagaggaaacattgcactacacctttcgacagggctacgtacgccaggcctgcaagatctccaacgtggagctctgcaacctggtctcctaccttggaattttgcacgaaaaccgccttgggcaaaacgtgcttcattccacgctcaagggcgaggcgcgccgcgactacgtccgcgactgcgtttacttatttctatgctacacctggcagacggccatgggcgtttggcagcagtgcttggaggagtgcaacctcaaggagctgcagaaactgctaaagcaaaacttgaaggacctatggacggccttcaacgagcgctccgtggccgcgcacctggcggacatcattttccccgaacgcctgcttaaaaccctgcaacagggtctgccagacttcaccagtcaaagcatgttgcagaactttaggaactttatcctagagcgctcaggaatcttgcccgccacctgctgtgcacttcctagcgactttgtgcccattaagtaccgcgaatgccctccgccgctttggggccactgctaccttctgcagctagccaactaccttgcctaccactctgacataatggaagacgtgagcggtgacggtctactggagtgtcactgtcgctgcaacctatgcaccccgcaccgctccctggtttgcaattcgcagctgcttaacgaaagtcaaattatcggtacctttgagctgcagggtccctcgcctgacgaaaagtccgcggctccggggttgaaactcactccggggctgtggacgtcggcttaccttcgcaaatttgtacctgaggactaccacgcccacgagattaggttctacgaagaccaatcccgcccgcctaatgcggagcttaccgcctgcgtcattacccagggccacattcttggccaattgcaagccatcaacaaagcccgccaagagtttctgctacgaaagggacggggggtttacttggacccccagtccggcgaggagctcaacccaatccccccgccgccgcagccctatcagcagcagccgcgggcccttgcttcccaggatggcacccaaaaagaagctgcagctgccgccgccacccacggacgaggaggaatactgggacagtcaggcagaggaggttttggacgaggaggaggaggacatgatggaagactgggagagcctagacgaggaagcttccgaggtcgaagaggtgtcagacgaaacaccgtcaccctcggtcgcattcccctcgccggcgccccagaaatcggcaaccggttccagcatggctacaacctccgctcctcaggcgccgccggcactgcccgttcgccgacccaaccgtagatgggacaccactggaaccagggccggtaagtccaagcagccgccgccgttagcccaagagcaacaacagcgccaaggctaccgctcatggcgcgggcacaagaacgccatagttgcttgcttgcaagactgtgggggcaacatctccttcgcccgccgctttcttctctaccatcacggcgtggccttcccccgtaacatcctgcattactaccgtcatctctacagcccatactgcaccggcggcagcggcagcaacagcagcggccacacagaagcaaaggcgaccggatagcaagactctgacaaagcccaagaaatccacagcggcggcagcagcaggaggaggagcgctgcgtctggcgcccaacgaacccgtatcgacccgcgagcttagaaacaggatttttcccactctgtatgctatatttcaacagagcaggggccaagaacaagagctgaaaataaaaaacaggtctctgcgatccctcacccgcagctgcctgtatcacaaaagcgaagatcagcttcggcgcacgctggaagacgcggaggctctcttcagtaaatactgcgcgctgactcttaaggactagtttcgcgccctttctcaaatttaagcgcgaaaactacgtcatctccagcggccacacccggcgccagcacctgttgtcagcgccattatgagcaaggaaattcccacgccctacatgtggagttaccagccacaaatgggacttgcggctggagctgcccaagactactcaacccgaataaactacatgagcgcgggaccccacatgatatcccgggtcaacggaatacgcgcccaccgaaaccgaattctcctggaacaggcggctattaccaccacacctcgtaataaccttaatccccgtagttggcccgctgccctggtgtaccaggaaagtcccgctcccaccactgtggtacttcccagagacgcccaggccgaagttcagatgactaactcaggggcgcagcttgcgggcggctttcgtcacagggtgcggtcgcccgggcagggtataactcacctgacaatcagagggcgaggtattcagctcaacgacgagtcggtgagctcctcgcttggtctccgtccggacgggacatttcagatcggcggcgccggccgctcttcattcacgcctcgtcaggcaatcctaactctgcagacctcgtcctctgagccgcgctctggaggcattggaactctgcaatttattgaggagtttgtgccatcggtctactttaaccccttctcgggacctcccggccactatccggatcaatttattcctaactttgacgcggtaaaggactcggcggacggctacgactgaatgttaagtggagaggcagagcaactgcgcctgaaacacctggtccactgtcgccgccacaagtgctttgcccgcgactccggtgagttttgctactttgaattgcccgaggatcatatcgagggcccggcgcacggcgtccggcttaccgcccagggagagcttgcccgtagcctgattcgggagtttacccagcgccccctgctagttgagcgggacaggggaccctgtgttctcactgtgatttgcaactgtcctaaccctggattacatcaagatc

SEQ ID NO: 2021 - protein, 84 aa, synthetic construct
  REGION 1..84: note = Ad5 Region E2, Hexon (C-terminal fragement)
TLWRIPFSSNFMSMGALTDLGQNLLYANSAHALDMTFEVDPMDEPTLLYVLFEVFDVVRVHQPHRGVIETVYLRTPFSAGNATT

SEQ ID NO: 2022 - protein, 204 aa, synthetic construct
  REGION 1..204: note = Ad5 Region E2, 23K endoprotease
MGSSEQELKAIVKDLGCGPYFLGTYDKRFPGFVSPHKLACAIVNTAGRETGGVHWMAFAWNPHSKTCYLFEPFGFSDQRLKQVYQFEYESLLRRSAIASSPDRCITLEKSTQSVQGPNSAACGLFCCMFLHAFANWPQTPMDHNPTMNLITGVPNSMLNSPQVQPTLRRNQEQLYSFLERHSPYFRSHSAQIRSATSFCHLKNM

SEQ ID NO: 2023 - protein, 529 aa, synthetic construct
  REGION 1..529: note = Ad5 Region E2, E2A/DBP
MASREEEQRETTPERGRGAARRPPTMEDVSSPSPSPPPPRAPPKKRMRRRIESEDEEDSSQDALVPRTPSPRPSTSAADLAIAPKKKKKRPSPKPERPPSPEVIVDSEEEREDVALQMVGFSNPPVLIKHGKGGKRTVRRLNEDDPVARGMRTQEEEEEPSEAESEITVMNPLSVPIVSAWEKGMEAARALMDKYHVDNDLKANFKLLPDQVEALAAVCKTWLNEEHRGLQLTFTSNKTFVTMMGRFLQAYLQSFAEVTYKHHEPTGCALWLHRCAEIEGELKCLHGSIMINKEHVIEMDVTSENGQRALKEQSSKAKIVKNRWGRNVVQISNTDARCCVHDAACPANQFSGKSCGMFFSEGAKAQVAFKQIKAFMQALYPNAQTGHGHLLMPLRCECNSKPGHAPFLGRQLPKLTPFALSNAEDLDADLISDKSVLASVHHPALIVFQCCNPVYRNSRAQGGGPNCDFKISAPDLLNALVMVRSLWSENFTELPRMVVPEFKWSTKHQYRNVSLPVAHSDARQNPFDF

SEQ ID NO: 2024 - protein, 807 aa, synthetic construct
  REGION 1..807: note = Ad5 Region E2, Hexon Assembly (100K)
MESVEKKDSLTAPSEFATTASTDAANAPTTFPVEAPPLEEEEVIIEQDPGFVSEDDEDRSVPTEDKKQDQDNAEANEEQVGRGDERHGDYLDVGDDVLLKHLQRQCAIICDALQERSDVPLAIADVSLAYERHLFSPRVPPKRQENGTCEPNPRLNFYPVFAVPEVLATYHIFFQNCKIPLSCRANRSRADKQLALRQGAVIPDIASLNEVPKIFEGLGRDEKRAANALQQENSENESHSGVLVELEGDNARLAVLKRSIEVTHFAYPALNLPPKVMSTVMSELIVRRAQPLERDANLQEQTEEGLPAVGDEQLARWLQTREPADLEERRKLMMAAVLVTVELECMQRFFADPEMQRKLEETLHYTFRQGYVRQACKISNVELCNLVSYLGILHENRLGQNVLHSTLKGEARRDYVRDCVYLFLCYTWQTAMGVWQQCLEECNLKELQKLLKQNLKDLWTAFNERSVAAHLADIIFPERLLKTLQQGLPDFTSQSMLQNFRNFILERSGILPATCCALPSDFVPIKYRECPPPLWGHCYLLQLANYLAYHSDIMEDVSGDGLLECHCRCNLCTPHRSLVCNSQLLNESQIIGTFELQGPSPDEKSAAPGLKLTPGLWTSAYLRKFVPEDYHAHEIRFYEDQSRPPNAELTACVITQGHILGQLQAINKARQEFLLRKGRGVYLDPQSGEELNPIPPPPQPYQQQPRALASQDGTQKEAAAAAATHGRGGILGQSGRGGFGRGGGGHDGRLGEPRRGSFRGRRGVRRNTVTLGRIPLAGAPEIGNRFQHGYNLRSSGAAGTARSPTQP

SEQ ID NO: 2025 - protein, 227 aa, synthetic construct
  REGION 1..227: note = Ad5 Region E2, Hexon Assembly (33K)
MAPKKKLQLPPPPTDEEEYWDSQAEEVLDEEEEDMMEDWESLDEEASEVEEVSDETPSPSVAFPSPAPQKSATGSSMATTSAPQAPPALPVRRPNRRWDTTGTRAAHTAPAAAAATAAATQKQRRPDSKTLTKPKKSTAAAAAGGGALRLAPNEPVSTRELRNRIFPTLYAIFQQSRGQEQELKIKNRSLRSLTRSCLYHKSEDQLRRTLEDAEALFSKYCALTLKD

SEQ ID NO: 2026 - protein, 194 aa, synthetic construct
  REGION 1..194: note = Ad5 Region E2, Hexon Assembly (22K)
MAPKKKLQLPPPPTDEEEYWDSQAEEVLDEEEEDMMEDWESLDEEASEVEEVSDETPSPSVAFPSPAPQKSATGSSMATTSAPQAPPALPVRRPNRRWDTTGTRAGKSKQPPPLAQEQQQRQGYRSWRGHKNAIVACLQDCGGNISFARRFLLYHHGVAFPRNILHYYRHLYSPYCTGGSGSNSSGHTEAKATG

SEQ ID NO: 2027 - protein, 227 aa, synthetic construct
  REGION 1..227: note = Ad5 Region E2, Hexon-associated precursor
MSKEIPTPYMWSYQPQMGLAAGAAQDYSTRINYMSAGPHMISRVNGIRAHRNRILLEQAAITTTPRNNLNPRSWPAALVYQESPAPTTVVLPRDAQAEVQMTNSGAQLAGGFRHRVRSPGQGITHLTIRGRGIQLNDESVSSSLGLRPDGTFQIGGAGRSSFTPRQAILTLQTSSSEPRSGGIGTLQFIEEFVPSVYFNPFSGPPGHYPDQFIPNFDAVKDSADGYD

SEQ ID NO: 2028-2029 - skipped (2 entries)

SEQ ID NO: 2030 - DNA, 5102 bp, synthetic construct
  misc_feature 1..5102: note = pALD-X80, Ad5 Region E4
  source 1..5102: mol_type = other DNA
gatcttattccctttaactaataaaaaaaaataataaagcatcacttacttaaaatcagttagcaaatttctgtccagtttattcagcagcacctccttgccctcctcccagctctggtattgcagcttcctcctggctgcaaactttctccacaatctaaatggaatgtcagtttcctcctgttcctgtccatccgcacccactatcttcatgttgttgcagatgaagcgcgcaagaccgtctgaagataccttcaaccccgtgtatccatatgacacggaaaccggtcctccaactgtgccttttcttactcctccctttgtatcccccaatgggtttcaagagagtccccctggggtactctctttgcgcctatccgaacctctagttacctccaatggcatgcttgcgctcaaaatgggcaacggcctctctctggacgaggccggcaaccttacctcccaaaatgtaaccactgtgagcccacctctcaaaaaaaccaagtcaaacataaacctggaaatatctgcacccctcacagttacctcagaagccctaactgtggctgccgccgcacctctaatggtcgcgggcaacacactcaccatgcaatcacaggccccgctaaccgtgcacgactccaaacttagcattgccacccaaggacccctcacagtgtcagaaggaaagctagccctgcaaacatcaggccccctcaccaccaccgatagcagtacccttactatcactgcctcaccccctctaactactgccactggtagcttgggcattgacttgaaagagcccatttatacacaaaatggaaaactaggactaaagtacggggctcctttgcatgtaacagacgacctaaacactttgaccgtagcaactggtccaggtgtgactattaataatacttccttgcaaactaaagttactggagccttgggttttgattcacaaggcaatatgcaacttaatgtagcaggaggactaaggattgattctcaaaacagacgccttatacttgatgttagttatccgtttgatgctcaaaaccaactaaatctaagactaggacagggccctctttttataaactcagcccacaacttggatattaactacaacaaaggcctttacttgtttacagcttcaaacaattccaaaaagcttgaggttaacctaagcactgccaaggggttgatgtttgacgctacagccatagccattaatgcaggagatgggcttgaatttggttcacctaatgcaccaaacacaaatcccctcaaaacaaaaattggccatggcctagaatttgattcaaacaaggctatggttcctaaactaggaactggccttagttttgacagcacaggtgccattacagtaggaaacaaaaataatgataagctaactttgtggaccacaccagctccatctcctaactgtagactaaatgcagagaaagatgctaaactcactttggtcttaacaaaatgtggcagtcaaatacttgctacagtttcagttttggctgttaaaggcagtttggctccaatatctggaacagttcaaagtgctcatcttattataagatttgacgaaaatggagtgctactaaacaattccttcctggacccagaatattggaactttagaaatggagatcttactgaaggcacagcctatacaaacgctgttggatttatgcctaacctatcagcttatccaaaatctcacggtaaaactgccaaaagtaacattgtcagtcaagtttacttaaacggagacaaaactaaacctgtaacactaaccattacactaaacggtacacaggaaacaggagacacaactccaagtgcatactctatgtcattttcatgggactggtctggccacaactacattaatgaaatatttgccacatcctcttacactttttcatacattgcccaagaataaagaatcgtttgtgttatgtttcaacgtgtttatttttcaattgcagaaaatttcaagtcatttttcattcagtagtatagccccaccaccacatagcttatacagatcaccgtaccttaatcaaactcacagaaccctagtattcaacctgccacctccctcccaacacacagagtacacagtcctttctccccggctggccttaaaaagcatcatatcatgggtaacagacatattcttaggtgttatattccacacggtttcctgtcgagccaaacgctcatcagtgatattaataaactccccgggcagctcacttaagttcatgtcgctgtccagctgctgagccacaggctgctgtccaacttgcggttgcttaacgggcggcgaaggagaagtccacgcctacatgggggtagagtcataatcgtgcatcaggatagggcggtggtgctgcagcagcgcgcgaataaactgctgccgccgccgctccgtcctgcaggaatacaacatggcagtggtctcctcagcgatgattcgcaccgcccgcagcataaggcgccttgtcctccgggcacagcagcgcaccctgatctcacttaaatcagcacagtaactgcagcacagcaccacaatattgttcaaaatcccacagtgcaaggcgctgtatccaaagctcatggcggggaccacagaacccacgtggccatcataccacaagcgcaggtagattaagtggcgacccctcataaacacgctggacataaacattacctcttttggcatgttgtaattcaccacctcccggtaccatataaacctctgattaaacatggcgccatccaccaccatcctaaaccagctggccaaaacctgcccgccggctatacactgcagggaaccgggactggaacaatgacagtggagagcccaggactcgtaaccatggatcatcatgctcgtcatgatatcaatgttggcacaacacaggcacacgtgcatacacttcctcaggattacaagctcctcccgcgttagaaccatatcccagggaacaacccattcctgaatcagcgtaaatcccacactgcagggaagacctcgcacgtaactcacgttgtgcattgtcaaagtgttacattcgggcagcagcggatgatcctccagtatggtagcgcgggtttctgtctcaaaaggaggtagacgatccctactgtacggagtgcgccgagacaaccgagatcgtgttggtcgtagtgtcatgccaaatggaacgccggacgtagtcatatttcctgaagcaaaaccaggtgcgggcgtgacaaacagatctgcgtctccggtctcgccgcttagatcgctctgtgtagtagttgtagtatatccactctctcaaagcatccaggcgccccctggcttcgggttctatgtaaactccttcatgcgccgctgccctgataacatccaccaccgcagaataagccacacccagccaacctacacattcgttctgcgagtcacacacgggaggagcgggaagagctggaagaaccatgtttttttttttattccaaaagattatccaaaacctcaaaatgaagatctattaagtgaacgcgctcccctccggtggcgtggtcaaactctacagccaaagaacagataatggcatttgtaagatgttgcacaatggcttccaaaaggcaaacggccctcacgtccaagtggacgtaaaggctaaacccttcagggtgaatctcctctataaacattccagcaccttcaaccatgcccaaataattctcatctcgccaccttctcaatatatctctaagcaaatcccgaatattaagtccggccattgtaaaaatctgctccagagcgccctccaccttcagcctcaagcagcgaatcatgattgcaaaaattcaggttcctcacagacctgtataagattcaaaagcggaacattaacaaaaataccgcgatcccgtaggtcccttcgcagggccagctgaacataatcgtgcaggtctgcacggaccagcgcggccacttccccgccaggaaccatgacaaaagaacccacactgattatgacacgcatactcggagctatgctaaccagcgtagccccgatgtaagcttgttgcatgggcggcgatataaaatgcaaggtgctgctcaaaaaatcaggcaaagcctcgcgcaaaaaagaaagcacatcgtagtcatgctcatgcagataaaggcaggtaagctccggaaccaccacagaaaaagacaccatttttctctcaaacatgtctgcgggtttctgcataaacacaaaataaaataacaaaaaaacatttaaacattagaagcctgtcttacaacaggaaaaacaacccttataagcataagacggactacggccatgccggcgtgaccgtaaaaaaactggtcaccgtgattaaaaagcaccaccgacagctcctcggtcatgtccggagtcataatgtaagactcggtaaacacatcaggttgattcacatcggtcagtgctaaaaagcgaccgaaatagcccgggggaatacatacccgcaggcgtagagacaacattacagcccccataggaggtataacaaaattaataggagagaaaaacacataaacacctgaaaaaccctcctgcctaggcaaaatagcaccctcccgctccagaacaacatacagcgcttccacagcggcagccataacagtcagccttaccagtaaaaaagaaaacctattaaaaaaacaccactcgacacggcaccagctcaatcagtcacagtgtaaaaaagggccaagtgcagagcgagtatatataggactaaaaaatgacgtaacggttaaagtccacaaaaaacacccagaaaaccgcacgcgaacctacgcccagaaacgaaagccaaaaaacccacaacttcctcaaatcgtcacttccgttttcccacgttacgtcacttcccattttaagaaaactacaattcccaacacatacaagttactccgccctaaaacctacgtcacccgccccgttcccacgccccgcgccacgtcacaaactccaccccctcattatcatattggcttcaatccaaaataa

SEQ ID NO: 2031 - protein, 581 aa, synthetic construct
  REGION 1..581: note = Ad5 Region E4, Fiber
MKRARPSEDTFNPVYPYDTETGPPTVPFLTPPFVSPNGFQESPPGVLSLRLSEPLVTSNGMLALKMGNGLSLDEAGNLTSQNVTTVSPPLKKTKSNINLEISAPLTVTSEALTVAAAAPLMVAGNTLTMQSQAPLTVHDSKLSIATQGPLTVSEGKLALQTSGPLTTTDSSTLTITASPPLTTATGSLGIDLKEPIYTQNGKLGLKYGAPLHVTDDLNTLTVATGPGVTINNTSLQTKVTGALGFDSQGNMQLNVAGGLRIDSQNRRLILDVSYPFDAQNQLNLRLGQGPLFINSAHNLDINYNKGLYLFTASNNSKKLEVNLSTAKGLMFDATAIAINAGDGLEFGSPNAPNTNPLKTKIGHGLEFDSNKAMVPKLGTGLSFDSTGAITVGNKNNDKLTLWTTPAPSPNCRLNAEKDAKLTLVLTKCGSQILATVSVLAVKGSLAPISGTVQSAHLIIRFDENGVLLNNSFLDPEYWNFRNGDLTEGTAYTNAVGFMPNLSAYPKSHGKTAKSNIVSQVYLNGDKTKPVTLTITLNGTQETGDTTPSAYSMSFSWDWSGHNYINEIFATSSYTFSYIAQE

SEQ ID NO: 2032 - protein, 128 aa, synthetic construct
  REGION 1..128: note = Ad5 Region E4, ORF1
MAAAVEALYVVLEREGAILPRQEGFSGVYVFFSPINFVIPPMGAVMLSLRLRVCIPPGYFGRFLALTDVNQPDVFTESYIMTPDMTEELSVVLFNHGDQFFYGHAGMAVVRLMLIRVVFPVVRQASNV

SEQ ID NO: 2033 - protein, 130 aa, synthetic construct
  REGION 1..130: note = Ad5 Region E4, ORF2
MFERKMVSFSVVVPELTCLYLHEHDYDVLSFLREALPDFLSSTLHFISPPMQQAYIGATLVSIAPSMRVIISVGSFVMVPGGEVAALVRADLHDYVQLALRRDLRDRGIFVNVPLLNLIQVCEEPEFLQS

SEQ ID NO: 2034 - protein, 116 aa, synthetic construct
  REGION 1..116: note = Ad5 Region E4, ORF3
MIRCLRLKVEGALEQIFTMAGLNIRDLLRDILRRWRDENYLGMVEGAGMFIEEIHPEGFSLYVHLDVRAVCLLEAIVQHLTNAIICSLAVEFDHATGGERVHLIDLHFEVLDNLLE

SEQ ID NO: 2035 - protein, 114 aa, synthetic construct
  REGION 1..114: note = Ad5 Region E4, ORF4
MVLPALPAPPVCDSQNECVGWLGVAYSAVVDVIRAAAHEGVYIEPEARGRLDALREWIYYNYYTERSKRRDRRRRSVCHARTWFCFRKYDYVRRSIWHDTTTNTISVVSAHSVQ

SEQ ID NO: 2036 - protein, 294 aa, synthetic construct
  REGION 1..294: note = Ad5 Region E4, ORF6
MTTSGVPFGMTLRPTRSRLSRRTPYSRDRLPPFETETRATILEDHPLLPECNTLTMHNVSYVRGLPCSVGFTLIQEWVVPWDMVLTREELVILRKCMHVCLCCANIDIMTSMMIHGYESWALHCHCSSPGSLQCIAGGQVLASWFRMVVDGAMFNQRFIWYREVVNYNMPKEVMFMSSVFMRGRHLIYLRLWYDGHVGSVVPAMSFGYSALHCGILNNIVVLCCSYCADLSEIRVRCCARRTRRLMLRAVRIIAEETTAMLYSCRTERRRQQFIRALLQHHRPILMHDYDSTPM

SEQ ID NO: 2037 - protein, 150 aa, synthetic construct
  REGION 1..150: note = Ad5 Region E4, ORF6/7
MTTSGVPFGMTLRPTRSRLSRRTPYSRDRLPPFETETRATILEDHPLLPECNTLTMHNAWTSPSPPVKQPQVGQQPVAQQLDSDMNLSELPGEFINITDERLARQETVWNITPKNMSVTHDMMLFKASRGERTVYSVCWEGGGRLNTRVL

SEQ ID NO: 2038-2999 - skipped (962 entries)

SEQ ID NO: 3000 - DNA, 32767 bp, synthetic construct
  misc_feature 1..32767: note = Adenovirus 2 (WT)
  source 1..32767: mol_type = other DNA
catcatcataatataccttattttggattgaagccaatatgataatgagggggtggagtttgtgacgtggcgcggggcgtgggaacggggcgggtgacgtagtagtgtggcggaagtgtgatgttgcaagtgtggcggaacacatgtaagcgccggatgtggtaaaagtgacgtttttggtgtgcgccggtgtatacgggaagtgacaattttcgcgcggttttaggcggatgttgtagtaaatttgggcgtaaccaagtaatgtttggccattttcgcgggaaaactgaataagaggaagtgaaatctgaataattctgtgttactcatagcgcgtaatatttgtctagggccgcggggactttgaccgtttacgtggagactcgcccaggtgtttttctcaggtgttttccgcgttccgggtcaaagttggcgttttattattatagtcagctgacgcgcagtgtatttatacccggtgagttcctcaagaggccactcttgagtgccagcgagtagagttttctcctccgagccgctccgacaccgggactgaaaatgagacatattatctgccacggaggtgttattaccgaagaaatggccgccagtcttttggaccagctgatcgaagaggtactggctgataatcttccacctcctagccattttgaaccacctacccttcacgaactgtatgatttagacgtgacggcccccgaagatcccaacgaggaggcggtttcgcagatttttcccgagtctgtaatgttggcggtgcaggaagggattgacttattcacttttccgccggcgcccggttctccggagccgcctcacctttcccggcagcccgagcagccggagcagagagccttgggtccggtttctatgccaaaccttgtgccggaggtgatcgatcttacctgccacgaggctggctttccacccagtgacgacgaggatgaagagggtgaggagtttgtgttagattatgtggagcaccccgggcacggttgcaggtcttgtcattatcaccggaggaatacgggggacccagatattatgtgttcgctttgctatatgaggacctgtggcatgtttgtctacagtaagtgaaaattatgggcagtcggtgatagagtggtgggtttggtgtggtaatttttttttaatttttacagttttgtggtttaaagaattttgtattgtgattttttaaaaggtcctgtgtctgaacctgagcctgagcccgagccagaaccggagcctgcaagacctacccggcgtcctaaattggtgcctgctatcctgagacgcccgacatcacctgtgtctagagaatgcaatagtagtacggatagctgtgactccggtccttctaacacacctcctgagatacacccggtggtcccgctgtgccccattaaaccagttgccgtgagagttggtgggcgtcgccaggctgtggaatgtatcgaggacttgcttaacgagtctgggcaacctttggacttgagctgtaaacgccccaggccataaggtgtaaacctgtgattgcgtgtgtggttaacgcctttgtttgctgaatgagttgatgtaagtttaataaagggtgagataatgtttaacttgcatggcgtgttaaatggggcggggcttaaagggtatataatgcgccgtgggctaatcttggttacatctgacctcatggaggcttgggagtgtttggaagatttttctgctgtgcgtaacttgctggaacagagctctaacagtacctcttggttttggaggtttctgtggggctcctcccaggcaaagttagtctgcagaattaaggaggattacaagtgggaatttgaagagcttttgaaatcctgtggtgagctgtttgattctttgaatctgggtcaccaggcgcttttccaagagaaggtcatcaagactttggatttttccacaccggggcgcgctgcggctgctgttgcttttttgagttttataaaggataaatggagcgaagaaacccatctgagcggggggtacctgctggattttctggccatgcatctgtggagagcggtggtgagacacaagaatcgcctgctactgttgtcttccgtccgcccggcaataataccgacggaggagcaacagcaggaggaagccaggcggcggcggcggcaggagcagagcccatggaacccgagagccggcctggaccctcgggaatgaatgttgtacaggtggctgaactgtttccagaactgagacgcattttaaccattaacgaggatgggcaggggctaaagggggtaaagagggagcggggggcttctgaggctacagaggaggctaggaatctaacttttagcttaatgaccagacaccgtcctgagtgtgttacttttcagcagattaaggataattgcgctaatgagcttgatctgctggcgcagaagtattccatagagcagctgaccacttactggctgcagccaggggatgattttgaggaggctattagggtatatgcaaaggtggcacttaggccagattgcaagtacaagattagcaaacttgtaaatatcaggaattgttgctacatttctgggaacggggccgaggtggagatagatacggaggatagggtggcctttagatgtagcatgataaatatgtggccgggggtgcttggcatggacggggtggttattatgaatgtgaggtttactggtcccaattttagcggtacggttttcctggccaataccaatcttatcctacacggtgtaagcttctatgggtttaacaatacctgtgtggaagcctggaccgatgtaagggttcggggctgtgccttttactgctgctggaagggggtggtgtgtcgccccaaaagcagggcttcaattaagaaatgcctgtttgaaaggtgtaccttgggtatcctgtctgagggtaactccagggtgcgccacaatgtggcctccgactgtggttgcttcatgctagtgaaaagcgtggctgtgattaagcataacatggtgtgtggcaactgcgaggacagggcctctcagatgctgacctgctcggacggcaactgtcacttgctgaagaccattcacgtagccagccactctcgcaaggcctggccagtgtttgagcacaacatactgacccgctgttccttgcatttgggtaacaggaggggggtgttcctaccttaccaatgcaatttgagtcacactaagatattgcttgagcccgagagcatgtccaaggtgaacctgaacggggtgtttgacatgaccatgaagatctggaaggtgctgaggtacgatgagacccgcaccaggtgcagaccctgcgagtgtggcggtaaacatattaggaaccagcctgtgatgctggatgtgaccgaggagctgaggcccgatcacttggtgctggcctgcacccgcgctgagtttggctctagcgatgaagatacagattgaggtactgaaatgtgtgggcgtggcttaagggtgggaaagaatatataaggtgggggtctcatgtagttttgtatctgttttgcagcagccgccgccatgagcgccaactcgtttgatggaagcattgtgagctcatatttgacaacgcgcatgcccccatgggccggggtgcgtcagaatgtgatgggctccagcattgatggtcgccccgtcctgcccgcaaactctactaccttgacctacgagaccgtgtctggaacgccgttggagactgcagcctccgccgccgcttcagccgctgcagccaccgcccgcgggattgtgactgactttgctttcctgagcccgcttgcaagcagtgcagcttcccgttcatccgcccgcgatgacaagttgacggctcttttggcacaattggattctttgacccgggaacttaatgtcgtttctcagcagctgttggatctgcgccagcaggtttctgccctgaaggcttcctcccctcccaatgcggtttaaaacataaataaaaaccagactctgtttggattttgatcaagcaagtgtcttgctgtctttatttaggggttttgcgcgcgcggtaggcccgggaccagcggtctcggtcgttgagggtcctgtgtattttttccaggacgtggtaaaggtgactctggatgttcagatacatgggcataagcccgtctctggggtggaggtagcaccactgcagagcttcatgctgcggggtggtgttgtagatgatccagtcgtagcaggagcgctgggcgtggtgcctaaaaatgtctttcagtagcaagctgattgccaggggcaggcccttggtgtaagtgtttacaaagcggttaagctgggatgggtgcatacgtggggatatgagatgcatcttggactgtatttttaggttggctatgttcccagccatatccctccggggattcatgttgtgcagaaccaccagcacagtgtatccggtgcacttgggaaatttgtcatgtagcttagaaggaaatgcgtggaagaacttggagacgcccttgtgacctccgagattttccatgcattcgtccataatgatggcaatgggcccacgggcggcggcctgggcgaagatatttctgggatcactaacgtcatagttgtgttccaggatgagatcgtcataggccatttttacaaagcgcgggcggagggtgccagactgcggtataatggttccatccggcccaggggcgtagttaccctcacagatttgcatttcccacgctttgagttcagatggggggatcatgtctacctgcggggcgatgaagaaaaccgtttccggggtaggggagatcagctgggaagaaagcaggttcctgagcagctgcgacttaccgcagccggtgggcccgtaaatcacacctattaccggctgcaactggtagttaagagagctgcagctgccgtcatccctgagcaggggggccacttcgttaagcatgtccctgacttgcatgttttccctgaccaaatgcgccagaaggcgctcgccgcccagcgatagcagttcttgcaaggaagcaaagtttttcaacggtttgaggccgtccgccgtaggcatgcttttgagcgtttgaccaagcagttccaggcggtcccacagctcggtcacgtgctctacggcatctcgatccagcatatctcctcgtttcgcgggttggggcggctttcgctgtacggcagtagtcggtgctcgtccagacgggccagggtcatgtctttccacgggcgcagggtcctcgtcagcgtagtctgggtcacggtgaaggggtgcgctccgggctgcgcgctggccagggtgcgcttgaggctggtcctgctggtgctgaagcgctgccggtcttcgccctgcgcgtcggccaggtagcatttgaccatggtgtcatagtccagcccctccgcggcgtggcccttggcgcgcagcttgcccttggaggaggcgccgcacgaggggcagtgcagacttttaagggcgtagagcttgggcgcgagaaataccgattccggggagtaggcatccgcgccgcaggccccgcagacggtctcgcattccacgagccaggtgagctctggccgttcggggtcaaaaaccaggtttcccccatgctttttgatgcgtttcttacctctggtttccatgagccggtgtccacgctcggtgacgaaaaggctgtccgtgtccccgtatacagacttgagaggcctgtcctcgagcggtgttccgcggtcctcctcgtatagaaactcggaccactctgagacgaaggctcgcgtccaggccagcacgaaggaggctaagtgggaggggtagcggtcgttgtccactagggggtccactcgctccagggtgtgaagacacatgtcgccctcttcggcatcaaggaaggtgattggtttataggtgtaggccacgtgaccgggtgttcctgaaggggggctataaaagggggtgggggcgcgttcgtcctcactctcttccgcatcgctgtctgcgagggccagctgttggggtgagtactccctctcaaaagcgggcatgacttctgcgctaagattgtcagtttccaaaaacgaggaggatttgatattcacctggcccgcggtgatgcctttgagggtggccgcgtccatctggtcagaaaagacaatctttttgttgtcaagcttggtggcaaacgacccgtagagggcgttggacagcaacttggcgatggagcgcagggtttggtttttgtcgcgatcggcgcgctccttggccgcgatgtttagctgcacgtattcgcgcgcaacgcaccgccattcgggaaagacggtggtgcgctcgtcgggcaccaggtgcacgcgccaaccgcggttgtgcagggtgacaaggtcaacgctggtggctacctctccgcgtaggcgctcgttggtccagcagaggcggccgcccttgcgcgaacagaatggcggtagtgggtctagctgcgtctcgtccggggggtctgcgtccacggtaaagaccccgggcagcaggcgcgcgtcgaagtagtctatcttgcatccttgcaagtctagcgcctgctgccatgcgcgggcggcaagcgcgcgctcgtatgggttgagtgggggaccccatggcatggggtgggtgagcgcggaggcgtacatgccgcaaatgtcgtaaacgtagaggggctctctgagtattccaagatatgtagggtagcatcttccaccgcggatgctggcgcgcacgtaatcgtatagttcgtgcgagggagcgaggaggtcgggaccgaggttgctacgggcgggctgctctgctcggaagactatctgcctgaagatggcatgtgagttggatgatatggttggacgctggaagacgttgaagctggcgtctgtgagacctaccgcgtcacgcacgaaggaggcgtaggagtcgcgcagcttgttgaccagctcggcggtgacctgcacgtctagggcgcagtagtccagggtttccttgatgatgtcatacttatcctgtcccttttttttccacagctcgcggttgaggacaaactcttcgcggtctttccagtactcttggatcggaaacccgtcggcctccgaacggtaagagcctagcatgtagaactggttgacggcctggtaggcgcagcatcccttttctacgggtagcgcgtatgcctgcgcggccttccggagcgaggtgtgggtgagcgcaaaggtgtccctaaccatgactttgaggtactggtatttgaagtcagtgtcgtcgcatccgccctgctcccagagcaaaaagtccgtgcgctttttggaacgcgggtttggcagggcgaaggtgacatcgttgaaaagtatctttcccgcgcgaggcataaagttgcgtgtgatgcggaagggtcccggcacctcggaacggttgttaattacctgggcggcgagcacgatctcgtcgaagccgttgatgttgtggcccacgatgtaaagttccaagaagcgcggggtgcccttgatggagggcaattttttaagttcctcgtaggtgagctcctcaggggagctgagcccgtgttctgacagggcccagtctgcaagatgagggttggaagcgacgaatgagctccacaggtcacgggccattagcatttgcaggtggtcgcgaaaggtcctaaactggcgacctatggccattttttctggggtgatgcagtagaaggtaagcgggtcttgttcccagcggtcccatccaaggtccacggctaggtctcgcgcggcggtcaccagaggctcatctccgccgaacttcataaccagcatgaagggcacgagctgcttcccaaaggcccccatccaagtataggtctctacatcgtaggtgacaaagagacgctcggtgcgaggatgcgagccgatcgggaagaactggatctcccgccaccagttggaggagtggctgttgatgtggtgaaagtagaagtccctgcgacgggccgaacactcgtgctggcttttgtaaaaacgtgcgcagtactggcagcggtgcacgggctgtacatcctgcacgaggttgacctgacgaccgcgcacaaggaagcagagtgggaatttgagcccctcgcctggcgggtttggctggtggtcttctacttcggctgcttgtccttgaccgtctggctgctcgaggggagttatggtggatcggaccaccacgccgcgcgagcccaaagtccagatgtccgcgcgcggcggtcggagcttgatgacaacatcgcgcagatgggagctgtccatggtctggagctcccgcggcgacaggtcaggcgggagctcctgcaggtttacctcgcatagccgggtcagggcgcgggctaggtccaggtgatacctgatttccaggggctggttggtggcggcgtcgatgacttgcaagaggccgcatccccgcggcgcgactacggtaccgcgcggcgggcggtgggccgcgggggtgtccttggatgatgcatctaaaagcggtgacgcgggcgggcccccggaggtagggggggctcgggacccgccgggagagggggcaggggcacgtcggcgccgcgcgcgggcaggagctggtgctgcgcgcggaggttgctggcgaacgcgacgacgcggcggttgatctcctgaatctggcgcctctgcgtgaagacgacgggcccggtgagcttgaacctgaaagagagttcgacagaatcaatttcggtgtcgttgacggcggcctggcgcaaaatctcctgcacgtctcctgagttgtcttgataggcgatttcggccatgaactgctcgatctcttcctcctggagatctccgcgtccggctcgctccacggtggcggcgaggtcgttggagatgcgggccatgagctgcgagaaggcgttgaggcctccctcgttccagacgcggctgtagaccacgcccccttcggcatcgcgggcgcgcatgaccacctgcgcgagattgagctccacgtgccgggcgaagacggcgtagtttcgcaggcgctgaaagaggtagttgagggtggtggcggtgtgttctgccacgaagaagtacataacccagcgtcgcaacgtggattcgttgatatcccccaaggcctcaaggcgctccatggcctcgtagaagtccacggcgaagttgaaaaactgggagttgcgcgccgacacggttaactcctcctccagaagacggatgagctcggcgacagtgtcgcgcacctcgcgctcaaaggctacaggggcctcttcttcttcaatctcctcttccataagggcctccccttcttcttcttcttctggcggcggtgggggaggggggacacggcggcgacgacggcgcaccgggaggcggtcgacaaagcgctcgatcatctccccgcggcgacggcgcatggtctcggtgacggcgcggccgttctcgcgggggcgcagttggaagacgccgcccgtcatgtcccggttatgggttggcggggggctgccgtgcggcagggatacggcgctaacgatgcatctcaacaattgttgtgtaggtactccgccaccgagggacctgagcgagtccgcatcgaccggatcggaaaacctctcgagaaaggcgtctaaccagtcacagtcgcaaggtaggctgagcaccgtggcgggcggcagcgggtggcggtcggggttgtttctggcggaggtgctgctgatgatgtaattaaagtaggcggtcttgagacggcggatggtcgacagaagcaccatgtccttgggtccggcctgctgaatgcgcaggcggtcggccatgccccaggcttcgttttgacatcggcgcaggtctttgtagtagtcttgcatgagcctttctaccggcacttcttcttctccttcctcttgtcctgcatctcttgcatctatcgctacggcggcggcggagtttggccgtaggtggcgccctcttcctcccatgcgtgtgaccccgaagcccctcatcggctgaagcagggccaggtcggcgacaacgcgctcggctaatatggcctgctgcacctgcgtgagggtagactggaagtcatccatgtccacaaagcggtggtatgcgcccgtgttgatggtgtaagtgcagttggccataacggaccagttaacggtctggtgacccggctgcgagagctcggtgtacctgagacgcgagtaagcccttgagtcaaagacgtagtcgttgcaagtccgcaccaggtactgatatcccaccaaaaagtgcggcggcggctggcggtagaggggccagcgtagggtggccggggctccgggggcgaggtcttccaacataaggcgatgatatccgtagatgtacctggacatccaggtgatgccggcggcggtggtggaggcgcgcggaaagtcgcggacgcggttccagatgttgcgcagcggcaaaaagtgctccatggtcgggacgctctggccggtgaggcgtgcgcagtcgttgacgctctagaccgtgcaaaaggagagcctgtaagcgggcactcttccgtggtctggtggataaattcgcaagggtatcatggcggacgaccggggttcgaaccccggatccggccgtccgccgtgatccatgcggttaccgcccgcgtgtcgaacccaggtgtgcgacgtcagacaacgggggagcgctccttttggcttccttccaggcgcggcggctgctgcgctagcttttttggccactggccgcgcgcggcgtaagcggttaggctggaaagcgaaagcattaagtggctcgctccctgtagccggagggttattttccaagggttgagtcgcaggacccccggttcgagtctcgggccggccggactgcggcgaacgggggtttgcctccccgtcatgcaagaccccgcttgcaaattcctccggaaacagggacgagccccttttttgcttttcccagatgcatccggtgctgcggcagatgcgcccccctcctcagcagcggcaagagcaagagcagcggcagacatgcagggcaccctccccttctcctaccgcgtcaggaggggcaacatccgcggctgacgcggcggcagatggtgattacgaacccccgcggcgccgggcccggcactacctggacttggaggagggcgagggcctggcgcggctaggagcgccctctcctgagcgacacccaagggtgcagctgaagcgtgacacgcgcgaggcgtacgtgccgcggcagaacctgtttcgcgaccgcgagggagaggagcccgaggagatgcgggatcgaaagttccacgcagggcgcgagttgcggcatggcctgaaccgcgagcggttgctgcgcgaggaggactttgagcccgacgcgcggaccgggattagtcccgcgcgcgcacacgtggcggccgccgacctggtaaccgcgtacgagcagacggtgaaccaggagattaactttcaaaaaagctttaacaaccacgtgcgcacgcttgtggcgcgcgaggaggtggctataggactgatgcatctgtgggactttgtaagcgcgctggagcaaaacccaaatagcaagccgctcatggcgcagctgttccttatagtgcagcacagcagggacaacgaggcattcagggatgcgctgctaaacatagtagagcccgagggccgctggctgctcgatttgataaacattctgcagagcatagtggtgcaggagcgcagcttgagcctggctgacaaggtggccgccattaactattccatgctcagtctgggcaagttttacgcccgcaagatataccataccccttacgttcccatagacaaggaggtaaagatcgaggggttctacatgcgcatggcgttgaaggtgcttaccttgagcgacgacctgggcgtttatcgcaacgagcgcatccacaaggccgtgagcgtgagccggcggcgcgagctcagcgaccgcgagctgatgcacagcctgcaaagggccctggctggcacgggcagcggcgatagagaggccgagtcctactttgacgcgggcgctgacctgcgctgggccccaagccgacgcgccctggaggcagctggggccggacctgggctggcggtggcacccgcgcgcgctggcaacgtcggcggcgtggaggaatatgacgaggacgatgagtacgagccagaggacggcgagtactaagcggtgatgtttctgatcagatgatgcaagacgcaacggacccggcggtgcgggcggcgctgcagagccagccgtccggccttaactccacggacgactggcgccaggtcatggaccgcatcatgtcgctgactgcgcgtaaccctgacgcgttccggcagcagccgcaggccaaccggctctccgcaattctggaagcggtggtcccggcgcgcgcaaaccccacgcacgagaaggtgctggcgatcgtaaacgcgctggccgaaaacagggccatccggcccgatgaggccggcctggtctacgacgcgctgcttcagcgcgtggctcgttacaacagcggcaacgtgcagaccaacctggaccggctggtgggggatgtgcgcgaggccgtggcgcagcgtgagcgcgcgcagcagcagggcaacctgggctccatggttgcactaaacgccttcctgagtacacagcccgccaacgtgccgcggggacaggaggactacaccaactttgtgagcgcactgcggctaatggtgactgagacaccgcaaagtgaggtgtaccagtccgggccagactattttttccagaccagtagacaaggcctgcagaccgtaaacctgagccaggctttcaagaacttgcaggggctgtggggggtgcgggctcccacaggcgaccgcgcgaccgtgtctagcttgctgacgcccaactcgcgcctgttgctgctgctaatagcgcccttcacggacagtggcagcgtgtcccgggacacatacctaggtcacttgctgacactgtaccgcgaggccataggtcaggcgcatgtggacgagcatactttccaggagattacaagtgtcagccgcgcgctggggcaggaggacacgggcagcctggaggcaaccctgaactacctgctgaccaaccggcggcagaagatcccctcgttgcacagtttaaacagcgaggaggagcgcatcttgcgctatgtgcagcagagcgtgagccttaacctgatgcgcgacggggtaacgcccagcgtggcgctggacatgaccgcgcgcaacatggaaccgggcatgtatgcctcaaaccggccgtttatcaatcgcctaatggactacttgcatcgcgcggccgccgtgaaccccgagtatttcaccaatgccatcttgaacccgcactggctaccgccccctggtttctacaccgggggatttgaggtgcccgagggtaacgatggattcctctgggacgacatagacgacagcgtgttttccccgcaaccgcagaccctgctagagttgcaacagcgcgagcaggcagaggcggcgctgcgaaaggaaagcttccgcaggccaagcagcttgtccgatctaggcgctgcggccccgcggtcagatgcgagtagcccatttccaagcttgatagggtcttttaccagcactcgcaccacccgcccgcgcctgctgggcgaggaggagtacctaaacaactcgctgctgcagccgcagcgcgaaaagaacctgcctccggcatttcccaacaacgggatagagagcctagtggacaagatgagtagatggaagacgtatgcgcaggagcacagggatgtgcccggcccgcgcccgcccacccgtcgtcaaaggcacgaccgtcagcggggtctggtgtgggaggacgatgactcggcagacgacagcagcgtcctggatttgggagggagtggcaacccgtttgcgcaccttcgccccaggctggggagaatgttttaaaaaaaaaaaaaaaaagcatgatgcaaaataaaaaactcaccaaggccatggcaccgagcgttggttttcttgtattccccttagtatgcagcgcgcggcgatgtatgaggaaggtcctcctccctcctacgagagcgtggtgagcgcggcgccagtggcggcggcgctgggttcccccttcgatgctcccctggacccgccgtttgtgcctccgcggtacctgcggcctaccggggggagaaacagcatccgttactctgagttggcacccctattcgacaccacccgtgtgtaccttgtggacaacaagtcaacggatgtggcatccctgaactaccagaacgaccacagcaactttctaaccacggtcattcaaaacaatgactacagcccgggggaggcaagcacacagaccatcaatcttgacgaccgttcgcactggggcggcgacctgaaaaccatcctgcataccaacatgccaaatgtgaacgagttcatgtttaccaataagtttaaggcgcgggtgatggtgtcgcgctcgcttactaaggacaaacaggtggagctgaaatatgagtgggtggagttcacgctgcccgagggcaactactccgagaccatgaccatagaccttatgaacaacgcgatcgtggagcactacttgaaagtgggcaggcagaacggggttctggaaagcgacatcggggtaaagtttgacacccgcaacttcagactggggtttgacccagtcactggtcttgtcatgcctggggtatatacaaacgaagccttccatccagacatcattttgctgccaggatgcggggtggacttcacccacagccgcctgagcaacttgttgggcatccgcaagcggcaacccttccaggagggctttaggatcacctacgatgacctggagggtggtaacattcccgcactgttggatgtggacgcctaccaggcaagcttaaaagatgacaccgaacagggcggggatggcgcaggcggcggcaacaacagtggcagcggcgcggaagagaactccaacgcggcagccgcggcaatgcagccggtggaggacatgaacgatcatgccattcgcggcgacacctttgccacacgggcggaggagaagcgcgctgaggccgaggcagcggcagaagctgccgcccccgctgcgcaacccgaggtcgagaagcctcagaagaaaccggtgatcaaacccctgacagaggacagcaagaaacgcagttacaacctaataagcaatgacagcaccttcacccagtaccgcagctggtaccttgcatacaactacggcgaccctcagaccgggatccgctcatggaccctcctttgcactcctgacgtaacctgcggctcggagcaggtctactggtcgttgccagacatgatgcaagaccccgtgaccttccgctccacgagccagatcagcaactttccggtggtgggcgccgagctgttgcccgtgcactccaagagcttctacaacgaccaggccgtctactcccagctcatccgccagtttacctctctgacccacgtgttcaatcgctttcccgagaaccagattttggcgcgcccgccagcccccaccatcaccaccgtcagtgaaaacgttcctgctctcacagatcacgggacgctaccgctgcgcaacagcatcggaggagtccagcgagtgaccattactgacgccagacgccgcacctgcccctacgtttacaaggccctgggcatagtctcgccgcgcgtcctatcgagccgcactttttgagcaaacatgtccatccttatatcgcccagcaataacacaggctggggcctgcgcttcccaagcaagatgtttggcggggcaaagaagcgctccgaccaacacccagtgcgcgtgcgcgggcactaccgcgcgccctggggcgcgcacaaacgcggccgcactgggcgcaccaccgtcgatgacgccattgacgcggtggtggaggaggcgcgcaactacacgcccacgccgccaccagtgtccacagtggacgcggccattcagaccgtggtgcgcggagcccggcgttatgctaaaatgaagagacggcggaggcgcgtagcacgtcgccaccgccgccgacccggcactgccgcccaacgcgcggcggcggccctgcttaaccgcgcacgtcgcaccggccgacgggcggccatgcgggccgctcgaaggctggccgcgggtattgtcactgtgccccccaggtccaggcgacgagcggccgccgcagcagccgcggccattagtgctatgactcagggtcgcaggggcaacgtgtactgggtgcgcgactcggttagcggcctgcgcgtgcccgtgcgcacccgccccccgcgcaactagattgcaagaaaaaactacttagactcgtactgttgtatgtatccagcggcggcggcgcgcaacgaagctatgtccaagcgcaaaatcaaagaagagatgctccaggtcatcgcgccggagatctatggccccccgaagaaggaagagcaggattacaagccccgaaagctaaagcgggtcaaaaagaaaaagaaagatgatgatgatgatgaacttgacgacgaggtggaactgctgcacgcaaccgcgcccaggcggcgggtacagtggaaaggtcgacgcgtaagacgtgttttgcgacccggcaccaccgtagtttttacgcccggtgagcgctccacccgcacctacaagcgcgtgtatgatgaggtgtacggcgacgaggacctgcttgagcaggccaacgagcgcctcggggagtttgcctacggaaagcggcataaggacatgttggcgttgccgctggacgagggcaacccaacacctagcctaaagcccgtgacactgcagcaggtgctgcccacgcttgcaccgtccgaagaaaagcgcggcctaaagcgcgagtctggtgacttggcacccaccgtgcagctgatggtacccaagcgccagcgactggaagatgtcttggaaaaaatgaccgtggagcctgggctggagcccgaggtccgcgtgcggccaatcaagcaggtggcaccgggactgggcgtgcagaccgtggacgttcagatacccaccaccagtagcactagtattgccactgccacagagggcatggagacacaaacgtccccggttgcctcggcggtggcagatgccgcggtgcaggcggccgctgcggccgcgtccaaaacctctacggaggtgcaaacggacccgtggatgtttcgcgtttcagccccccggcgcccgcgccgttccaggaagtacggcaccgccagcgcactactgcccgaatatgccctacatccttccatcgcgcctacccccggctatcgtggctacacctaccgccccagaagacgagcgactacccgacgccgaaccaccactggaacccgccgccgccgtcgccgtcgccagcccgtgctggccccgatttccgtgcgcagggtggctcgcgaaggaggcaggaccctggtgctgccaacagcgcgctaccaccccagcatcgtttaaaagccggtctttgtggttcttgcagatatggccctcacctgccgcctccgtttcccggtgccgggattccgaggaagaatgcaccgtaggaggggcatggccggccacggcctgacgggcggcatgcgtcgtgcgcaccaccggcggcggcgcgcgtcgcaccgtcgcatgcgcggcggtatcctgcccctccttattccactgatcgccgcggcgattggcgccgtgcccggaattgcatccgtggccttgcaggcgcagagacactgattaaaaacaagttgcatgtggaaaaatcaaaataaaaagtctggagtctcacgctcgcttggtcctgtaactattttgtagaatggaagacatcaactttgcgtctctggccccgcgacacggctcgcgcccgttcatgggaaactggcaagatatcggcaccagcaatatgagcggtggcgccttcagctggggctcgctgtggagcggcattaaaaatttcggttccaccattaagaactatggcagcaaggcctggaacagcagcacaggccagatgctgagggacaagttgaaagagcaaaatttccaacaaaaggtggtagatggcctggcctctggcattagcggggtggtggacctggccaaccaggcagtgcaaaataagattaacagtaagcttgatccccgccctcccgtagaggagcctccaccggccgtggagacagtgtctccagaggggcgtggcgaaaagcgtccgcggcccgacagggaagaaactctggtgacgcaaatagatgagcctccctcgtacgaggaggcactaaagcaaggcctgcccaccacccgtcccatcgcgcccatggctaccggagtgctgggccagcacacacctgtaacgctggacctgcctccccccgctgacacccagcagaaacctgtgctgccagggccgtccgccgttgttgtaacccgccctagccgcgcgtccctgcgccgtgccgccagcggtccgcgatcgatgcggcccgtagccagtggcaactggcaaagcacactgaacagcatcgtgggtctgggggtgcaatccctgaagcgccgacgatgcttctaaatagctaacgtgtcgtatgtgtcatgtatgcgtccatgtcgccgccagaggagctgctgagccgccgtgcgcccgctttccaagatggctaccccttcgatgatgccgcagtggtcttacatgcacatctcgggccaggacgcctcggagtacctgagccccgggctggtgcagtttgcccgcgccaccgagacgtacttcagcctgaataacaagtttagaaaccccacggtggcacctacgcacgacgtaaccacagaccggtcccagcgtttgacgctgcggttcatccctgtggaccgcgaggataccgcgtactcgtacaaagcgcggttcaccctggctgtgggtgacaaccgtgtgcttgatatggcttccacgtactttgacatccgcggcgtgctggacagggggcctacttttaagccctactccggcactgcctacaacgctctagctcccaagggcgctcctaactcctgtgagtgggaacaaaccgaagatagcggccgggcagttgccgaggatgaagaagaggaagatgaagatgaagaagaggaagaagaagagcaaaacgctcgagatcaggctactaagaaaacacatgtctatgcccaggctcctttgtctggagaaacaattacaaaaagcgggctacaaataggatcagacaatgcagaaacacaagctaaacctgtatacgcagatccttcctatcaaccagaacctcaaattggcgaatctcagtggaacgaagctgatgctaatgcggcaggagggagagtgcttaaaaaaacaactcccatgaaaccatgctatggatcttatgccaggcctacaaatccttttggtggtcaatccgttctggttccggatgaaaaaggggtgcctcttccaaaggttgacttgcaattcttctcaaatactacctctttgaacgaccggcaaggcaatgctactaaaccaaaagtggttttgtacagtgaagatgtaaatatggaaaccccagacacacatctgtcttacaaacctggaaaaggtgatgaaaattctaaagctatgttgggtcaacaatctatgccaaacagacccaattacattgctttcagggacaattttattggcctaatgtattataacagcactggcaacatgggtgttcttgctggtcaggcatcgcagctaaatgccgtggtagatttgcaagacagaaacacagagctgtcctatcaactcttgcttgattccataggtgatagaaccagatatttttctatgtggaatcaggctgtagacagctatgatccagatgttagaatcattgaaaaccatggaactgaggatgaattgccaaattattgttttcctcttgggggtattggggtaactgacacctatcaagctattaaggctaatggcaatggctcaggcgataatggagatactacatggacaaaagatgaaacttttgcaacacgtaatgaaataggagtgggtaacaactttgccatggaaattaacctaaatgccaacctatggagaaatttcctttactccaatattgcgctgtacctgccagacaagctaaaatacaaccccaccaatgtggaaatatctgacaaccccaacacctacgactacatgaacaagcgagtggtggctcccgggcttgtagactgctacattaaccttggggcgcgctggtctctggactacatggacaacgttaatccctttaaccaccaccgcaatgcgggcctccgttatcgctccatgttgttgggaaacggccgctacgtgccctttcacattcaggtgccccaaaagttttttgccattaaaaacctcctcctcctgccaggctcatatacatatgaatggaacttcaggaaggatgttaacatggttctgcagagctctctgggaaacgatcttagagttgacggggctagcattaagtttgacagcatttgtctttacgccaccttcttccccatggcccacaacacggcctccacgctggaagccatgctcagaaatgacaccaacgaccagtcctttaatgactacctttccgccgccaacatgctataccccatacccgccaacgccaccaacgtgcccatctccatcccatcgcgcaactgggcagcatttcgcggttgggccttcacacgcttgaagacaaaggaaaccccttccctgggatcaggctacgacccttactacacctactctggctccataccataccttgacggaaccttctatcttaatcacacctttaagaaggtggccattacctttgactcttctgttagctggccgggcaacgaccgcctgcttactcccaatgagtttgagattaaacgctcagttgacggggagggctacaacgtagctcagtgcaacatgaccaaggactggttcctggtgcagatgttggccaactacaatattggctaccagggcttctacattccagaaagctacaaggaccgcatgtactcgttcttcagaaacttccagcccatgagccggcaagtggttgacgatactaaatacaaggagtatcagcaggttggaattcttcaccagcataacaactcaggattcgtaggctacctcgctcccaccatgcgcgagggacaggcttaccccgccaacgtgccctacccactaataggcaaaaccgcggttgacagtattacccagaaaaagtttctttgcgatcgcaccctttggcgcatcccattctccagtaactttatgtccatgggcgcactcacagacctgggccaaaaccttctctacgccaactccgcccacgcgctagacatgacttttgaggtggatcccatggacgagcccacccttctttatgttttgtttgaagtctttgacgtggtccgtgtgcaccagccgcaccgcggcgtcatcgagaccgtgtacctgcgcacgcccttctcggccggcaacgccacaacataaaagaagcaagcaacatcaacaacagctgccgccatgggctccagtgagcaggaactgaaagccattgtcaaagatcttggttgtgggccatattttttgggcacctatgacaagcgctttccaggctttgtttctccacacaagctcgcctgcgccatagtcaatacggccggtcgcgagactgggggcgtacactggatggcctttgcctggaacccgcgctcaaaaacatgctacctctttgagccctttggcttttctgaccaacgactcaagcaggtttaccagtttgagtacgagtcactcctgcgccgtagcgccattgcttcttcccccgaccgctgtataacgctggaaaagtccacccaaagcgtgcaggggcccaactcggccgcctgtggactattctgctgcatgtttctccacgcctttgccaactggccccaaactcccatggatcacaaccccaccatgaaccttattaccggggtacccaactccatgcttaacagtccccaggtacagcccaccctgcgtcgcaaccaggaacagctctacagcttcctggagcgccactcgccctacttccgcagccacagtgcgcagattaggagcgccacttctttttgtcacttgaaaaacatgtaaaaataatgtactaggagacactttcaataaaggcaaatgtttttatttgtacactctcgggtgattatttaccccccacccttgccgtctgcgccgtttaaaaatcaaaggggttctgccgcgcatcgctatgcgccactggcagggacacgttgcgatactggtgtttagtgctccacttaaactcaggcacaaccatccgcggcagctcggtgaagttttcactccacaggctgcgcaccatcaccaacgcgtttagcaggtcgggcgccgatatcttgaagtcgcagttggggcctccgccctgcgcgcgcgagttgcgatacacagggttgcagcactggaacactatcagcgccgggtggtgcacgctggccagcacgctcttgtcggagatcagatccgcgtccaggtcctccgcgttgctcagggcgaacggagtcaactttggtagctgccttcccaaaaagggtgcatgcccaggctttgagttgcactcgcaccgtagtggcatcagaaggtgaccgtgcccggtctgggcgttaggatacagcgcctgcatgaaagccttgatctgcttaaaagccacctgagcctttgcgccttcagagaagaacatgccgcaagacttgccggaaaactgattggccggacaggccgcgtcatgcacgcagcaccttgcgtcggtgttggagatctgcaccacatttcggccccaccggttcttcacgatcttggccttgctagactgctccttcagcgcgcgctgcccgttttcgctcgtcacatccatttcaatcacgtgctccttatttatcataatgctcccgtgtagacacttaagctcgccttcgatctcagcgcagcggtgcagccacaacgcgcagcccgtgggctcgtggtgcttgtaggttacctctgcaaacgactgcaggtacgcctgcaggaatcgccccatcatcgtcacaaaggtcttgttgctggtgaaggtcagctgcaacccgcggtgctcctcgtttagccaggtcttgcatacggccgccagagcttccacttggtcaggcagtagcttgaagtttgcctttagatcgttatccacgtggtacttgtccatcaacgcgcgcgcagcctccatgcccttctcccacgcagacacgatcggcaggctcagcgggtttatcaccgtgctttcactttccgcttcactggactcttccttttcctcttgcgtccgcataccccgcgccactgggtcgtcttcattcagccgccgcaccgtgcgcttacctcccttgccgtgcttgattagcaccggtgggttgctgaaacccaccatttgtagcgccacatcttctctttcttcctcgctgtccacgatcacctctggggatggcgggcgctcgggcttgggagaggggcgcttctttttctttttggacgcaatggccaaatccgccgtcgaggtcgatggccgcgggctgggtgtgcgcggcaccagcgcatcttgtgacgagtcttcttcgtcctcggactcgagacgccgcctcagccgcttttttgggggcgcgcggggaggcggcggcgacggcgacggggacgacacgtcctccatggttggtggacgtcgcgccgcaccgcgtccgcgctcgggggtggtttcgcgctgctcctcttcccgactggccatttccttctcctataggcagaaaaagatcatggagtcagtcgagaaggaggacagcctaaccgccccctttgagttcgccaccaccgcctccaccgatgccgccaacgcgcctaccaccttccccgtcgaggcacccccgcttgaggaggaggaagtgattatcgagcaggacccaggttttgtaagcgaagacgacgaggatcgctcagtaccaacagaggataaaaagcaagaccaggacgacgcagaggcaaacgaggaacaagtcgggcggggggaccaaaggcatggcgactacctagatgtgggagacgacgtgctgttgaagcatctgcagcgccagtgcgccattatctgcgacgcgttgcaagagcgcagcgatgtgcccctcgccatagcggatgtcagccttgcctacgaacgccacctgttctcaccgcgcgtaccccccaaacgccaagaaaacggcacatgcgagcccaacccgcgcctcaacttctaccccgtatttgccgtgccagaggtgcttgccacctatcacatctttttccaaaactgcaagatacccctatcctgccgtgccaaccgcagccgagcggacaagcagctggccttgcggcagggcgctgtcatacctgatatcgcctcgctcgacgaagtgccaaaaatctttgagggtcttggacgcgacgagaaacgcgcggcaaacgctctgcaacaagaaaacagcgaaaatgaaagtcactgtggagtgctggtggaacttgagggtgacaacgcgcgcctagccgtgctgaaacgcagcatcgaggtcacccactttgcctacccggcacttaacctaccccccaaggttatgagcacagtcatgagcgagctgatcgtgcgccgtgcacgacccctggagagggatgcaaacttgcaagaacaaaccgaggagggcctacccgcagttggcgatgagcagctggcgcgctggcttgagacgcgcgagcctgccgacttggaggagcgacgcaagctaatgatggccgcagtgcttgttaccgtggagcttgagtgcatgcagcggttctttgctgacccggagatgcagcgcaagctagaggaaacgttgcactacacctttcgccagggctacgtgcgccaggcctgcaaaatttccaacgtggagctctgcaacctggtctcctaccttggaattttgcacgaaaaccgcctcgggcaaaacgtgcttcattccacgctcaagggcgaggcgcgccgcgactacgtccgcgactgcgtttacttatttctgtgctacacctggcaaacggccatgggcgtgtggcagcaatgcctggaggagcgcaacctaaaggagctgcagaagctgctaaagcaaaacttgaaggacctatggacggccttcaacgagcgctccgtggccgcgcacctggcggacattatcttccccgaacgcctgcttaaaaccctgcaacagggtctgccagacttcaccagtcaaagcatgttgcaaaactttaggaactttatcctagagcgttcaggaattctgcccgccacctgctgtgcgcttcctagcgactttgtgcccattaagtaccgtgaatgccctccgccgctttggggtcactgctaccttctgcagctagccaactaccttgcctaccactccgacatcatggaagacgtgagcggtgacggcctactggagtgtcactgtcgctgcaacctatgcaccccgcaccgctccctggtctgcaattcgcaactgcttagcgaaagtcaaattatcggtacctttgagctgcagggtccctcgcctgacgaaaagtccgcggctccggggttgaaactcactccggggctgtggacgtcggcttaccttcgcaaatttgtacctgaggactaccacgcccacgagattaggttctacgaagaccaatcccgcccgccaaatgcggagcttaccgcctgcgtcattacccagggccacatccttggccaattgcaagccatcaacaaagcccgccaagagtttctgctacgaaagggacggggggtttacctggacccccagtccggcgaggagctcaacccaatccccccgccgccgcagccctatcagcagccgcgggcccttgcttcccaggatggcacccaaaaagaagctgcagctgccgccgccgccacccacggacgaggaggaatactgggacagtcaggcagaggaggttttggacgaggaggaggagatgatggaagactgggacagcctagacgaagcttccgaggccgaagaggtgtcagacgaaacaccgtcaccctcggtcgcattcccctcgccggcgccccagaaattggcaaccgttcccagcatcgctacaacctccgctcctcaggcgccgccggcactgcctgttcgccgacccaaccgtagatgggacaccactggaaccagggccggtaagtctaagcagccgccgccgttagcccaagagcaacaacagcgccaaggctaccgctcgtggcgcgggcacaagaacgccatagttgcttgcttgcaagactgtgggggcaacatctccttcgcccgccgctttcttctctaccatcacggcgtggccttcccccgtaacatcctgcattactaccgtcatctctacagcccctactgcaccggcggcagcggcagcggcagcaacagcagcggtcacacagaagcaaaggcgaccggatagcaagactctgacaaagcccaagaaatccacagcggcggcagcagcaggaggaggagcgctgcgtctggcgcccaacgaacccgtatcgacccgcgagcttagaaataggatttttcccactctgtatgctatatttcaacaaagcaggggccaagaacaagagctgaaaataaaaaacaggtctctgcgctccctcacccgcagctgcctgtatcacaaaagcgaagatcagcttcggcgcacgctggaagacgcggaggctctcttcagcaaatactgcgcgctgactcttaaggactagtttcgcgccctttctcaaatttaagcgcgaaaactacgtcatctccagcggccacacccggcgccagcacctgtcgtcagcgccattatgagcaaggaaattcccacgccctacatgtggagttaccagccacaaatgggacttgcggctggagctgcccaagactactcaacccgaataaactacatgagcgcgggaccccacatgatatcccgggtcaacggaatccgcgcccaccgaaaccgaattctcctcgaacaggcggctattaccaccacacctcgtaataaccttaatccccgtagttggcccgctgccctggtgtaccaggaaagtcccgctcccaccactgtggtacttcccagagacgcccaggccgaagttcagatgactaactcaggggcgcagcttgcgggcggctttcgtcacagggtgcggtcgcccgggcagggtataactcacctgaaaatcagagggcgaggtattcagctcaacgacgagtcggtgagctcctctcttggtctccgtccggacgggacatttcagatcggcggcgctggccgctcttcatttacgccccgtcaggcgatcctaactctgcagacctcgtcctcggagccgcgctccggaggcattggaactctacaatttattgaggagttcgtgccttcggtttacttcaaccccttttctggacctcccggccactacccggaccagtttattcccaactttgacgcggtgaaagactcggcggacggctacgactgaatgaccagtggagaggcagagcgactgcgcctgacacacctcgaccactgccgccgccacaagtgctttgcccgcggctccggtgagttttgttactttgaattgcccgaagagcatatcgagggcccggcgcacggcgtccggctcaccacccaggtagagcttacacgtagcctgattcgggagtttaccaagcgccccctgctagtggagcgggagcggggtccctgtgttctgaccgtggtttgcaactgtcctaaccctggattacatcaagatctttgttgtcatctctgtgctgagtataataaatacagaaattagaatctactggggctcctgtcgccatcctgtgaacgccaccgtttttacccacccaaagcagaccaaagcaaacctcacctccggtttgcacaagcgggccaataagtaccttacctggtactttaacggctcttcatttgtaatttacaacagtttccagcgagacgaagtaagtttgccacacaaccttctcggcttcaactacaccgtcaagaaaaacaccaccaccaccaccctcctcacctgccgggaacgtacgagtgcgtcaccggttgctgcgcccacacctacagcctgagcgtaaccagacattactcccatttttccaaaacaggaggtgagctcaactcccggaactcaggtcaaaaaagcattttgcggggtgctgggattttttaattaagtatatgagcaattcaagtaactctacaagcttgtctaatttttctggaattggggtcggggttatccttactcttgtaattctgtttattcttatactagcacttctgtgccttagggttgccgcctgctgcacgcacgtttgtacctattgtcagctttttaaacgctgggggcaacatccaagatgaggtacatgattttaggcttgctcgcccttgcggcagtctgcagcgctgccaaaaaggttgagtttaaggaaccagcttgcaatgttacatttaaatcagaagctaatgaatgcactactcttataaaatgcaccacagaacatgaaaagcttattattcgccacaaagacaaaattggcaagtatgctgtatatgctatttggcagccaggtgacactaacgactataatgtcacagtcttccaaggtgaaaatcgtaaaacttttatgtataaatttccattttatgaaatgtgcgatattaccatgtacatgagcaaacagtacaagttgtggcccccacaaaagtgtttagagaacactggcaccttttgttccaccgctctgcttattacagcgcttgctttggtatgtaccttactttatctcaaatacaaaagcagacgcagttttattgatgaaaagaaaatgccttgattttccgcttgcttgtattcccctggacaatttactctatgtgggatatgctccaggcgggcaagattatacccacaaccttcaaatcaaactttcctggacgttagcgcctgatttctgccagcgcctgcactgcaaatttgatcaaacccagcttcagcttgcctgctccagagatgaccggctcaaccatcgcgcccacaacggactatcgcaacaccactgctaccggactaacatctgccctaaatttaccccaagttcatgcctttgtcaatgactgggcgagcttggacatgtggtggttttccatagcgcttatgtttgtttgccttattattatgtggcttatttgttgcctaaagcgcagacgcgccagaccccccatctataggcctatcattgtgctcaacccacacaatgaaaaaattcatagattggacggtctgaaaccatgttctcttcttttacagtatgattaaatgagacatgattcctcgagttcttatattattgacccttgttgcgcttttctgtgcgtgctctacattggccgcggtcgctcacatcgaagtagattgcatcccacctttcacagtttacctgctttacggatttgtcacccttatcctcatctgcagcctcgtcactgtagtcatcgccttcattcagttcattgactgggtttgtgtgcgcattgcgtacctcaggcaccatccgcaatacagagacaggactatagctgatcttctcagaattctttaattatgaaacggagtgtcatttttgttttgctgattttttgcgccctacctgtgctttgctcccaaacctcagcgcctcccaaaagacatatttcctgcagattcactcaaatatggaacattcccagctgctacaacaaacagagcgatttgtcagaagcctggttatacgccatcatctctgtcatggttttttgcagtaccatttttgccctagccatatatccataccttgacattggctggaatgccatagatgccatgaaccaccctactttcccagtgcccgctgtcataccactgcaacaggttattgccccaatcaatcagcctcgccccccttctcccacccccactgagattagctactttaatttgacaggtggagatgactgaatctctagatctagaattggatggaattaacaccgaacagcgcctactagaaaggcgcaaggcggcgtccgagcgagaacgcctaaaacaagaagttgaagacatggttaacctacaccagtgtaaaagaggtatcttttgtgtggtcaagcaggccaaacttacctacgaaaaaaccactaccggcaaccgcctcagctacaagctacccacccagcgccaaaaactggtgcttatggtgggagaaaaacctatcaccgtcacccagcactcggcagaaacagagggctgcctgcacttcccctatcagggtccagaggacctctgcactcttattaaaaccatgtgtggtattagagatcttattccattcaactaacataaacacacaataaattacttacttaaaatcagtcagcaaatctttgtccagcttattcagcatcacctcctttccttcctcccaactctggtatctcagccgccttttagctgcaaactttctccaaagtttaaatgggatgtcaaattcctcatgttcttgtccctccgcacccactatcttcatattgttgcagatgaaacgcgccagaccgtctgaagacaccttcaaccccgtgtatccatatgacacagaaaccgggcctccaactgtgccctttcttacccctccatttgtttcacccaatggtttccaagaaagtccccctggagttctctctctacgcgtctccgaacctttggacacctcccacggcatgcttgcgcttaaaatgggcagcggtcttaccctagacaaggccggaaacctcacctcccaaaatgtaaccactgttactcagccacttaaaaaaacaaagtcaaacataagtttggacacctccgcaccacttacaattacctcaggcgccctaacagtggcaaccaccgctcctctgatagttactagcggcgctcttagcgtacagtcacaagccccactgaccgtgcaagactccaaactaagcattgctactaaagggcccattacagtgtcagatggaaagctagccctgcaaacatcagcccccctctctggcagtgacagcgacacccttactgtaactgcatcacccccgctaactactgccacgggtagcttgggcattaacatggaagatcctatttatgtaaataatggaaaaataggaattaaaataagcggtcctttgcaagtagcacaaaactccgatacactaacagtagttactggaccaggtgtcaccgttgaacaaaactcccttagaaccaaagttgcaggagctattggttatgattcatcaaacaacatggaaattaaaacgggcggtggcatgcgtataaataacaacttgttaattctagatgtggattacccatttgatgctcaaacaaaactacgtcttaaactggggcagggacccctgtatattaatgcatctcataacttggacataaactataacagaggcctatacctttttaatgcatcaaacaatactaaaaaactggaagttagcataaaaaaatccagtggactaaactttgataatactgccatagctataaatgcaggaaagggtctggagtttgatacaaacacatctgagtctccagatatcaacccaataaaaactaaaattggctctggcattgattacaatgaaaacggtgccatgattactaaacttggagcgggtttaagctttgacaactcaggggccattacaataggaaacaaaaatgatgacaaacttaccctgtggacaaccccagacccatctcctaactgcagaattcattcagataatgactgcaaatttactttggttcttacaaaatgtgggagtcaagtactagctactgtagctgctttggctgtatctggagatctttcatccatgacaggcaccgttgcaagtgttagtatattccttagatttgaccaaaacggtgttctaatggagaactcctcacttaaaaaacattactggaactttagaaatgggaactcaactaatgcaaatccatacacaaatgcagttggatttatgcctaaccttctagcctatccaaaaacccaaagtcaaactgctaaaaataacattgtcagtcaagtttacttgcatggtgataaaactaaacctatgatacttaccattacacttaatggcactagtgaatccacagaaactagcgaggtaagcacttactctatgtcttttacatggtcctgggaaagtggaaaatacaccactgaaacttttgctaccaactcttacaccttctcctacattg

SEQ ID NO: 3001-3009 - skipped (9 entries)

SEQ ID NO: 3010 - DNA, 731 bp, synthetic construct
  misc_feature 1..731: note = pHELP_KanV4, Ad2 Region VA-RNA
  source 1..731: mol_type = other DNA
ggatgttgcccctcctgacgcggtaggagaaggggagggtgccctgcatgtctgccgctgctcttgctcttgccgctgctgaggaggggggcgcatctgccgcagcaccggatgcatctgggaaaagcaaaaaaggggctcgtccctgtttccggaggaatttgcaagcggggtcttgcatgacggggaggcaaacccccgttcgccgcagtccggccggcccgagactcgaaccgggggtcctgcgactcaacccttggaaaataaccctccggctacagggagcgagccacttaatgctttcgctttccagcctaaccgcttacgccgcgcgcggccagtggccaaaaaagctagcgcagcagccgccgcgcctggaaggaagccaaaaggagcgctcccccgttgtctgacgtcgcacacctgggttcgacacgcgggcggtaaccgcatggatcacggcggacggccggatccggggttcgaaccccggtcgtccgccatgatacccttgcgaatttatccaccagaccacggaagagtgcccgcttacaggctctccttttgcacggtctagagcgtcaacgactgcgcacgcctcaccggccagagcgtcccgaccatggagcactttttgccgctgcgcaacatctggaaccgcgtccgcgactttccgcgcgcctccaccaccgccgccggcatcacctggatgtccaggtacatctacggat

SEQ ID NO: 3011 - DNA, 157 bp, synthetic construct
  misc_feature 1..157: note = Ad2 VA-RNA region (VA RNA I)
  source 1..157: mol_type = other DNA
gggcactcttccgtggtctggtggataaattcgcaagggtatcatggcggacgaccggggttcgaaccccggatccggccgtccgccgtgatccatgcggttaccgcccgcgtgtcgaacccaggtgtgcgacgtcagacaacgggggagcgctcct

SEQ ID NO: 3012 - DNA, 158 bp, synthetic construct
  misc_feature 1..158: note = Ad2 VA-RNA region (VA RNA II)
  source 1..158: mol_type = other DNA
ggctcgctccctgtagccggagggttattttccaagggttgagtcgcaggacccccggttcgagtctcgggccggccggactgcggcgaacgggggtttgcctccccgtcatgcaagaccccgcttgcaaattcctccggaaacagggacgagcccct

SEQ ID NO: 3013-3019 - skipped (7 entries)

SEQ ID NO: 3020 - DNA, 3038 bp, synthetic construct
  misc_feature 1..3038: note = pHELP_KanV4, Ad2 Region E2
  source 1..3038: mol_type = other DNA
gttttagggcggagtaacttgcatgtattgggaattgtagtttttttaaaatgggaagtgacgtatcgtgggaaaacggaagtgaagatttgaggaagttgtgggttttttggctttcgtttctgggcgtaggttcgcgtgcggttttctgggtgttttttgtggactttaaccgttacgtcattttttagtcctatatatactcgctctgtacttggccctttttacactgtgactgattgagctggtgccgtgtcgagtggtgttttttaataggtttttttactggtaaggctgactgttatggctgccgctgtggaagcgctgtatgttgttctggagcgggagggtgctattttgcctaggcaggagggtttttcaggtgtttatgtgtttttctctcctattaattttgttatacctcctatgggggctgtaatgttgtctctacgcctgcgggtatgtattcccccgggctatttcggtcgctttttagcactgaccgatgttaaccaacctgatgtgtttaccgagtcttacattatgactccggacatgaccgaggaactgtcggtggtgctttttaatcacggtgaccagtttttttacggtcacgccggcatggccgtagtccgtcttatgcttataagggttgtttttcctgttgtaagacaggcttctaatgtttaaatgtttttttttttgttattttattttgtgtttaatgcaggaacccgcagacatgtttgagagaaaaatggtgtctttttctgtggtggttccggaacttacctgcctttatctgcatgagcatgactacgatgtgcttgcttttttgcgcgaggctttgcctgattttttgagcagcaccttgcattttatatcgccgcccatgcaacaagcttacataggggctacgctggttagcatagctccgagtatgcgtgtcataatcagtgtgggttcttttgtcatggttcctggcggggaagtggccgcgctggtccgtgcagacctgcacgattatgttcagctggccctgcgaagggacctacgggatcgcggtatttttgttaatgttccgcttttgaatcttatacaggtctgtgaggaacctgaatttttgcaatcatgattcgctgcttgaggctgaaggtggagggcgctctggagcagatttttacaatggccggacttaatattcgggatttgcttagagacatattgataaggtggcgagatgaaaattatttgggcatggttgaaggtgctggaatgtttatagaggagattcaccctgaagggtttagcctttacgtccacttggacgtgagggcagtttgccttttggaagccattgtgcaacatcttacaaatgccattatctgttctttggctgtagagtttgaccacgccaccggaggggagcgcgttcacttaatagatcttcattttgaggttttggataatcttttggaataaaaaaaaaaaaacatggttcttccagctcttcccgctcctcccgtgtgtgactcgcagaacgaatgtgtaggttggctgggtgtggcttattctgcggtggtggatgttatcagggcagcggcgcatgaaggagtttacatagaacccgaagccagggggcgcctggatgctttgagagagtggatatactacaactactacacagagcgagctaagcgacgagaccggagacgcagatctgtttgtcacgcccgcacctggttttgcttcaggaaatatgactacgtccggcgttccatttggcatgacactacgaccaacacgatctcggttgtctcggcgcactccgtacagtagggatcgcctacctccttttgagacagagacccgcgctaccatactggaggatcatccgctgctgcccgaatgtaacactttgacaatgcacaacgtgagttacgtgcgaggtcttccctgcagtgtgggatttacgctgattcaggaatgggttgttccctgggatatggttctgacgcgggaggagcttgtaatcctgaggaagtgtatgcacgtgtgcctgtgttgtgccaacattgatatcatgacgagcatgatgatccatggttacgagtcctgggctctccactgtcattgttccagtcccggttccctgcagtgcatagccggcgggcaggttttggccagctggtttaggatggtggtggatggcgccatgtttaatcagaggtttatatggtaccgggaggtggtgaattacaacatgccaaaagaggtaatgtttatgtccagcgtgtttatgaggggtcgccacttaatctacctgcgcttgtggtatgatggccacgtgggttctgtggtccccgccatgagctttggatacagcgccttgcactgtgggattttgaacaatattgtggtgctgtgctgcagttactgtgctgatttaagtgagatcagggtgcgctgctgtgcccggaggacaaggcgtctcatgctgcgggcggtgcgaatcatcgctgaggagaccactgccatgttgtattcctgcaggacggagcggcggcggcagcagtttattcgcgcgctgctgcagcaccaccgccctatcctgatgcacgattatgactctacccccatgtaggcgtggacttccccttcgccgcccgttgagcaaccgcaagttggacagcagcctgtggctcagcagctggacagcgacatgaacttaagcgagctgcccggggagtttattaatatcactgatgagcgtttggctcgacaggaaaccgtgtggaatataacacctaagaatatgtctgttacccatgatatgatgctttttaaggccagccggggagaaaggactgtgtactctgtgtgttgggagggaggtggcaggttgaatactagggttctgtgagtttgattaaggtacggtgatcaatataagctatgtggtggtggggctatactactgaatgaaaaatgacttgaaattttctgcaattgaaaaataaacacgttgaaacataaca

SEQ ID NO: 3021 - skipped

SEQ ID NO: 3022 - protein, 52 aa, synthetic construct
  REGION 1..52: note = Ad2 Region E2, 23K endoprotease (C-terminal fragment)
VPNSMLNSPQVQPTLRRNQEQLYSFLERHSPYFRSHSAQIRSATSFCHLKNM

SEQ ID NO: 3023 - protein, 529 aa, synthetic construct
  REGION 1..529: note = Ad2 Region E2, E2A/DBP
MASREEEQRETTPERGRGAARRPPTMEDVSSPSPSPPPPRAPPKKRLRRRLESEDEEDSSQDALVPRTPSPRPSTSTADLAIASKKKKKRPSPKPERPPSPEVIVDSEEEREDVALQMVGFSNPPVLIKHGKGGKRTVRRLNEDDPVARGMRTQEEKEESSEAESESTVINPLSLPIVSAWEKGMEAARALMDKYHVDNDLKANFKLLPDQVEALAAVCKTWLNEEHRGLQLTFTSNKTFVTMMGRFLQAYLQSFAEVTYKHHEPTGCALWLHRCAEIEGELKCLHGSIMINKEHVIEMDVTSENGQRALKEQSSKAKIVKNRWGRNVVQISNTDARCCVHDAACPANQFSGKSCGMFFSEGAKAQVAFKQIKAFMQALYPNAQTGHGHLLMPLRCECNSKPGHAPFLGRQLPKLTPFALSNAEDLDADLISDKSVLASVHHPALIVFQCCNPVYRNSRAQGGGPNCDFKISAPDLLNALVMVRSLWSENFTELPRMVVPEFKWSTKHQYRNVSLPVAHSDARQNPFDF

SEQ ID NO: 3024 - protein, 805 aa, synthetic construct
  REGION 1..805: note = Ad2 Region E2, Hexon Assembly (100K)
MESVEKEDSLTAPFEFATTASTDAANAPTTFPVEAPPLEEEEVIIEQDPGFVSEDDEDRSVPTEDKKQDQDDAEANEEQVGRGDQRHGDYLDVGDDVLLKHLQRQCAIICDALQERSDVPLAIADVSLAYERHLFSPRVPPKRQENGTCEPNPRLNFYPVFAVPEVLATYHIFFQNCKIPLSCRANRSRADKQLALRQGAVIPDIASLDEVPKIFEGLGRDEKRAANALQQENSENESHCGVLVELEGDNARLAVLKRSIEVTHFAYPALNLPPKVMSTVMSELIVRRARPLERDANLQEQTEEGLPAVGDEQLARWLETREPADLEERRKLMMAAVLVTVELECMQRFFADPEMQRKLEETLHYTFRQGYVRQACKISNVELCNLVSYLGILHENRLGQNVLHSTLKGEARRDYVRDCVYLFLCYTWQTAMGVWQQCLEERNLKELQKLLKQNLKDLWTAFNERSVAAHLADIIFPERLLKTLQQGLPDFTSQSMLQNFRNFILERSGILPATCCALPSDFVPIKYRECPPPLWGHCYLLQLANYLAYHSDIMEDVSGDGLLECHCRCNLCTPHRSLVCNSQLLSESQIIGTFELQGPSPDEKSAAPGLKLTPGLWTSAYLRKFVPEDYHAHEIRFYEDQSRPPNAELTACVITQGHILGQLQAINKARQEFLLRKGRGVYLDPQSGEELNPIPPPPQPYQQPRALASQDGTQKEAAAAAAATHGRGGILGQSGRGGFGRGGGDDGRLGQPRRSFRGRRGVRRNTVTLGRIPLAGAPEIGNRSQHRYNLRSSGAAGTACSPTQP

SEQ ID NO: 3025 - protein, 228 aa, synthetic construct
  REGION 1..228: note = Ad2 Region E2, Hexon Assembly (33K)
MAPKKKLQLPPPPPTDEEEYWDSQAEEVLDEEEEMMEDWDSLDEASEAEEVSDETPSPSVAFPSPAPQKLATVPSIATTSAPQAPPALPVRRPNRRWDTTGTRAAPTAPAAAAAAATAAVTQKQRRPDSKTLTKPKKSTAAAAAGGGALRLAPNEPVSTRELRNRIFPTLYAIFQQSRGQEQELKIKNRSLRSLTRSCLYHKSEDQLRRTLEDAEALFSKYCALTLKD

SEQ ID NO: 3026 - protein, 195 aa, synthetic construct
  REGION 1..195: note = Ad2 Region E2, Hexon Assembly (22K)
MAPKKKLQLPPPPPTDEEEYWDSQAEEVLDEEEEMMEDWDSLDEASEAEEVSDETPSPSVAFPSPAPQKLATVPSIATTSAPQAPPALPVRRPNRRWDTTGTRAGKSKQPPPLAQEQQQRQGYRSWRGHKNAIVACLQDCGGNISFARRFLLYHHGVAFPRNILHYYRHLYSPYCTGGSGSGSNSSGHTEAKATG

SEQ ID NO: 3027 - protein, 125 aa, synthetic construct
  REGION 1..125: note = Ad2 Region E2, Hexon-associated precursor
MSKEIPTPYMWSYQPQMGLAAGAAQDYSTRINYMSAGPHMISRVNGIRAHRNRILLEQAAITTTPRNNLNPRSWPAALVYQESPAPTTVVLPRDAQAEVQMTNSGAQLAGGFRHRVRSPGRFRAE

SEQ ID NO: 3028-3029 - skipped (2 entries)

SEQ ID NO: 3030 - DNA, 5343 bp, synthetic construct
  misc_feature 1..5343: note = pHELP_KanV4, Ad2 Region E4
  source 1..5343: mol_type = other DNA
ggtacccaactccatgcttaacagtccccaggtacagcccaccctgcgtcgcaaccaggaacagctctacagcttcctggagcgccactcgccctacttccgcagccacagtgcgcagattaggagcgccacttctttttgtcacttgaaaaacatgtaaaaataatgtactaggagacactttcaataaaggcaaatgtttttatttgtacactctcgggtgattatttaccccccacccttgccgtctgcgccgtttaaaaatcaaaggggttctgccgcgcatcgctatgcgccactggcagggacacgttgcgatactggtgtttagtgctccacttaaactcaggcacaaccatccgcggcagctcggtgaagttttcactccacaggctgcgcaccatcaccaacgcgtttagcaggtcgggcgccgatatcttgaagtcgcagttggggcctccgccctgcgcgcgcgagttgcgatacacagggttgcagcactggaacactatcagcgccgggtggtgcacgctggccagcacgctcttgtcggagatcagatccgcgtccaggtcctccgcgttgctcagggcgaacggagtcaactttggtagctgccttcccaaaaagggtgcatgcccaggctttgagttgcactcgcaccgtagtggcatcagaaggtgaccgtgcccggtctgggcgttaggatacagcgcctgcatgaaagccttgatctgcttaaaagccacctgagcctttgcgccttcagagaagaacatgccgcaagacttgccggaaaactgattggccggacaggccgcgtcatgcacgcagcaccttgcgtcggtgttggagatctgcaccacatttcggccccaccggttcttcacgatcttggccttgctagactgctccttcagcgcgcgctgcccgttttcgctcgtcacatccatttcaatcacgtgctccttatttatcataatgctcccgtgtagacacttaagctcgccttcgatctcagcgcagcggtgcagccacaacgcgcagcccgtgggctcgtggtgcttgtaggttacctctgcaaacgactgcaggtacgcctgcaggaatcgccccatcatcgtcacaaaggtcttgttgctggtgaaggtcagctgcaacccgcggtgctcctcgtttagccaggtcttgcatacggccgccagagcttccacttggtcaggcagtagcttgaagtttgcctttagatcgttatccacgtggtacttgtccatcaacgcgcgcgcagcctccatgcccttctcccacgcagacacgatcggcaggctcagcgggtttatcaccgtgctttcactttccgcttcactggactcttccttttcctcttgcgtccgcataccccgcgccactgggtcgtcttcattcagccgccgcaccgtgcgcttacctcccttgccgtgcttgattagcaccggtgggttgctgaaacccaccatttgtagcgccacatcttctctttcttcctcgctgtccacgatcacctctggggatggcgggcgctcgggcttgggagaggggcgcttctttttctttttggacgcaatggccaaatccgccgtcgaggtcgatggccgcgggctgggtgtgcgcggcaccagcgcatcttgtgacgagtcttcttcgtcctcggactcgagacgccgcctcagccgcttttttgggggcgcgcggggaggcggcggcgacggcgacggggacgacacgtcctccatggttggtggacgtcgcgccgcaccgcgtccgcgctcgggggtggtttcgcgctgctcctcttcccgactggccatttccttctcctataggcagaaaaagatcatggagtcagtcgagaaggaggacagcctaaccgccccctttgagttcgccaccaccgcctccaccgatgccgccaacgcgcctaccaccttccccgtcgaggcacccccgcttgaggaggaggaagtgattatcgagcaggacccaggttttgtaagcgaagacgacgaggatcgctcagtaccaacagaggataaaaagcaagaccaggacgacgcagaggcaaacgaggaacaagtcgggcggggggaccaaaggcatggcgactacctagatgtgggagacgacgtgctgttgaagcatctgcagcgccagtgcgccattatctgcgacgcgttgcaagagcgcagcgatgtgcccctcgccatagcggatgtcagccttgcctacgaacgccacctgttctcaccgcgcgtaccccccaaacgccaagaaaacggcacatgcgagcccaacccgcgcctcaacttctaccccgtatttgccgtgccagaggtgcttgccacctatcacatctttttccaaaactgcaagatacccctatcctgccgtgccaaccgcagccgagcggacaagcagctggccttgcggcagggcgctgtcatacctgatatcgcctcgctcgacgaagtgccaaaaatctttgagggtcttggacgcgacgagaaacgcgcggcaaacgctctgcaacaagaaaacagcgaaaatgaaagtcactgtggagtgctggtggaacttgagggtgacaacgcgcgcctagccgtgctgaaacgcagcatcgaggtcacccactttgcctacccggcacttaacctaccccccaaggttatgagcacagtcatgagcgagctgatcgtgcgccgtgcacgacccctggagagggatgcaaacttgcaagaacaaaccgaggagggcctacccgcagttggcgatgagcagctggcgcgctggcttgagacgcgcgagcctgccgacttggaggagcgacgcaagctaatgatggccgcagtgcttgttaccgtggagcttgagtgcatgcagcggttctttgctgacccggagatgcagcgcaagctagaggaaacgttgcactacacctttcgccagggctacgtgcgccaggcctgcaaaatttccaacgtggagctctgcaacctggtctcctaccttggaattttgcacgaaaaccgcctcgggcaaaacgtgcttcattccacgctcaagggcgaggcgcgccgcgactacgtccgcgactgcgtttacttatttctgtgctacacctggcaaacggccatgggcgtgtggcagcaatgcctggaggagcgcaacctaaaggagctgcagaagctgctaaagcaaaacttgaaggacctatggacggccttcaacgagcgctccgtggccgcgcacctggcggacattatcttccccgaacgcctgcttaaaaccctgcaacagggtctgccagacttcaccagtcaaagcatgttgcaaaactttaggaactttatcctagagcgttcaggaattctgcccgccacctgctgtgcgcttcctagcgactttgtgcccattaagtaccgtgaatgccctccgccgctttggggtcactgctaccttctgcagctagccaactaccttgcctaccactccgacatcatggaagacgtgagcggtgacggcctactggagtgtcactgtcgctgcaacctatgcaccccgcaccgctccctggtctgcaattcgcaactgcttagcgaaagtcaaattatcggtacctttgagctgcagggtccctcgcctgacgaaaagtccgcggctccggggttgaaactcactccggggctgtggacgtcggcttaccttcgcaaatttgtacctgaggactaccacgcccacgagattaggttctacgaagaccaatcccgcccgccaaatgcggagcttaccgcctgcgtcattacccagggccacatccttggccaattgcaagccatcaacaaagcccgccaagagtttctgctacgaaagggacggggggtttacctggacccccagtccggcgaggagctcaacccaatccccccgccgccgcagccctatcagcagccgcgggcccttgcttcccaggatggcacccaaaaagaagctgcagctgccgccgccgccacccacggacgaggaggaatactgggacagtcaggcagaggaggttttggacgaggaggaggagatgatggaagactgggacagcctagacgaagcttccgaggccgaagaggtgtcagacgaaacaccgtcaccctcggtcgcattcccctcgccggcgccccagaaattggcaaccgttcccagcatcgctacaacctccgctcctcaggcgccgccggcactgcctgttcgccgacccaaccgtagatgggacaccactggaaccagggccggtaagtctaagcagccgccgccgttagcccaagagcaacaacagcgccaaggctaccgctcgtggcgcgggcacaagaacgccatagttgcttgcttgcaagactgtgggggcaacatctccttcgcccgccgctttcttctctaccatcacggcgtggccttcccccgtaacatcctgcattactaccgtcatctctacagcccctactgcaccggcggcagcggcagcggcagcaacagcagcggtcacacagaagcaaaggcgaccggatagcaagactctgacaaagcccaagaaatccacagcggcggcagcagcaggaggaggagcgctgcgtctggcgcccaacgaacccgtatcgacccgcgagcttagaaataggatttttcccactctgtatgctatatttcaacaaagcaggggccaagaacaagagctgaaaataaaaaacaggtctctgcgctccctcacccgcagctgcctgtatcacaaaagcgaagatcagcttcggcgcacgctggaagacgcggaggctctcttcagcaaatactgcgcgctgactcttaaggactagtttcgcgccctttctcaaatttaagcgcgaaaactacgtcatctccagcggccacacccggcgccagcacctgtcgtcagcgccattatgagcaaggaaattcccacgccctacatgtggagttaccagccacaaatgggacttgcggctggagctgcccaagactactcaacccgaataaactacatgagcgcgggaccccacatgatatcccgggtcaacggaatccgcgcccaccgaaaccgaattctcctcgaacaggcggctattaccaccacacctcgtaataaccttaatccccgtagttggcccgctgccctggtgtaccaggaaagtcccgctcccaccactgtggtacttcccagagacgcccaggccgaagttcagatgactaactcaggggcgcagcttgcgggcggctttcgtcacagggtgcggtcgcccgggc

SEQ ID NO: 3031 - skipped

SEQ ID NO: 3032 - protein, 128 aa, synthetic construct; identical to SEQ ID NO: 2032
  REGION 1..128: note = Ad2 Region E4, ORF1

SEQ ID NO: 3033 - protein, 130 aa, synthetic construct
  REGION 1..130: note = Ad2 Region E4, ORF2
MFERKMVSFSVVVPELTCLYLHEHDYDVLAFLREALPDFLSSTLHFISPPMQQAYIGATLVSIAPSMRVIISVGSFVMVPGGEVAALVRADLHDYVQLALRRDLRDRGIFVNVPLLNLIQVCEEPEFLQS

SEQ ID NO: 3034 - protein, 116 aa, synthetic construct
  REGION 1..116: note = Ad2 Region E4, ORF3
MIRCLRLKVEGALEQIFTMAGLNIRDLLRDILIRWRDENYLGMVEGAGMFIEEIHPEGFSLYVHLDVRAVCLLEAIVQHLTNAIICSLAVEFDHATGGERVHLIDLHFEVLDNLLE

SEQ ID NO: 3035 - protein, 114 aa, synthetic construct
  REGION 1..114: note = Ad2 Region E4, ORF4
MVLPALPAPPVCDSQNECVGWLGVAYSAVVDVIRAAAHEGVYIEPEARGRLDALREWIYYNYYTERAKRRDRRRRSVCHARTWFCFRKYDYVRRSIWHDTTTNTISVVSAHSVQ

SEQ ID NO: 3036 - protein, 294 aa, synthetic construct; identical to SEQ ID NO: 2036
  REGION 1..294: note = Ad2 Region E4, ORF6

SEQ ID NO: 3037 - protein, 150 aa, synthetic construct
  REGION 1..150: note = Ad2 Region E4, ORF6/7
MTTSGVPFGMTLRPTRSRLSRRTPYSRDRLPPFETETRATILEDHPLLPECNTLTMHNAWTSPSPPVEQPQVGQQPVAQQLDSDMNLSELPGEFINITDERLARQETVWNITPKNMSVTHDMMLFKASRGERTVYSVCWEGGGRLNTRVL

SEQ ID NO: 3038-9899 - skipped (6862 entries)

SEQ ID NO: 9900 - DNA, 7638 bp, synthetic construct
  misc_feature 1..7638: note = AAV-CBA-ABCD1-WPRE, full plasmid
  source 1..7638: mol_type = other DNA
ggccactccctctctgcgcgctcgctcgctcactgaggccgcccgggcaaagcccgggcgtcgggcgacctttggtcgcccggcctcagtgagcgagcgagcgcgcagagagggagtggccaactccatcactaggggttcctcagatctgaattcggtacctagttattaatagtaatcaattacggggtcattagttcatagcccatatatggagttccgcgttacataacttacggtaaatggcccgcctggctgaccgcccaacgacccccgcccattgacgtcaataatgacgtatgttcccatagtaacgccaatagggactttccattgacgtcaatgggtggagtatttacggtaaactgcccacttggcagtacatcaagtgtatcatatgccaagtacgccccctattgacgtcaatgacggtaaatggcccgcctggcattatgcccagtacatgaccttatgggactttcctacttggcagtacatctacgtattagtcatcgctattaccatggtcgaggtgagccccacgttctgcttcactctccccatctcccccccctccccacccccaattttgtatttatttattttttaattattttgtgcagcgatgggggcggggggggggggggggcgcgcgccaggcggggcggggcggggcgaggggcggggcggggcgaggcggagaggtgcggcggcagccaatcagagcggcgcgctccgaaagtttccttttatggcgaggcggcggcggcggcggccctataaaaagcgaagcgcgcggcgggcgggagtcgctgcgcgctgccttcgccccgtgccccgctccgccgccgcctcgcgccgcccgccccggctctgactgaccgcgttactcccacaggtgagcgggcgggacggcccttctcctccgggctgtaattagcgcttggtttaatgacggcttgtttcttttctgtggctgcgtgaaagccttgaggggctccgggagctagagcctctgctaaccatgttcatgccttcttctttttcctacagctcctgggcaacgtgctggttattgtgctgtctcatcattttggcaaagaattcctcgaagatccgaaggggttcaagctttccagttgcctagacaacaggcccagggtcagagcaacaatccttccagccacctgcctcaactgctgccccaggcaccagccccagtccctacgcggcagccagcccaggtgacatgccggtgctctccaggccccggccctggcgggggaacacgctgaagcgcacggccgtgctcctggccctcgcggcctatggagcccacaaagtctaccccttggtgcgccagtgcctggccccggccaggggtcttcaggcgcccgccggggagcccacgcaggaggcctccggggtcgcggcggccaaagctggcatgaaccgggtattcctgcagcggctcctgtggctcctgcggctgctgttcccccgggtcctgtgccgggagacggggctgctggccctgcactcggccgccttggtgagccgcaccttcctgtcggtgtatgtggcccgcctggacggaaggctggcccgctgcatcgtccgcaaggacccgcgggcttttggctggcagctgctgcagtggctcctcatcgccctccctgctaccttcgtcaacagtgccatccgttacctggagggccaactggccctgtcgttccgcagccgtctggtggcccacgcctaccgcctctacttctcccagcagacctactaccgggtcagcaacatggacgggcggcttcgcaaccctgaccagtctctgacggaggacgtggtggcctttgcggcctctgtggcccacctctactccaacctgaccaagccactcctggacgtggctgtgacttcctacaccctgcttcgggcggcccgctcccgtggagccggcacagcctggccctcggccatcgccggcctcgtggtgttcctcacggccaacgtgctgcgggccttctcgcccaagttcggggagctggtggcagaggaggcgcggcggaagggggagctgcgctacatgcactcgcgtgtggtggccaactcggaggagatcgccttctatgggggccatgaggtggagctggccctgctacagcgctcctaccaggacctggcctcgcagatcaacctcatccttctggaacgcctgtggtatgttatgctggagcagttcctcatgaagtatgtgtggagcgcctcgggcctgctcatggtggctgtccccatcatcactgccactggctactcagagtcagatgcagaggccgtgaagaaggcagccttggaaaagaaggaggaggagctggtgagcgagcgcacagaagccttcactattgcccgcaacctcctgacagcggctgcagatgccattgagcggatcatgtcgtcgtacaaggaggtgacggagctggctggctacacagcccgggtgcacgagatgttccaggtatttgaagatgttcagcgctgtcacttcaagaggcccagggagctagaggacgctcaggcggggtctgggaccataggccggtctggtgtccgtgtggagggccccctgaagatccgaggccaggtggtggatgtggaacaggggatcatctgcgagaacatccccatcgtcacgccctcaggagaggtggtggtggccagcctcaacatcagggtggaggaaggcatgcatctgctcatcacaggccccaatggctgcggcaagagctccctgttccggatcctgggtgggctctggcccacgtacggtggtgtgctctacaagcccccaccccagcgcatgttctacatcccgcagaggccctacatgtctgtgggctccctgcgtgaccaggtgatctacccggactcagtggaggacatgcaaaggaagggctactcggagcaggacctggaagccatcctggacgtcgtgcacctgcaccacatcctgcagcgggagggaggttgggaggctatgtgtgactggaaggacgtcctgtcgggtggcgagaagcagagaatcggcatggcccgcatgttctaccacaggcccaagtacgccctcctggatgaatgcaccagcgccgtgagcatcgacgtggaaggcaagatcttccaggcggccaaggacgcgggcattgccctgctctccatcacccaccggccctccctgtggaaataccacacacacttgctacagttcgatggggagggcggctggaagttcgagaagctggactcagctgcccgcctgagcctgacggaggagaagcagcggctggagcagcagctggcgggcattcccaagatgcagcggcgcctccaggagctctgccagatcctgggcgaggccgtggccccagcgcatgtgccggcacctagcccgcaaggccctggtggcctccagggtgcctccacctgacacaaccgtccccggcccctgccccgcccccaagctcggatcacatgaattctgcagatatccagcacagtggcggccgctcgagctagcggccgctctagaagataatcaacctctggattacaaaatttgtgaaagattgactggtattcttaactatgttgctccttttacgctatgtggatacgctgctttaatgcctttgtatcatgctattgcttcccgtatggctttcattttctcctccttgtataaatcctggttgctgtctctttatgaggagttgtggcccgttgtcaggcaacgtggcgtggtgtgcactgtgtttgctgacgcaacccccactggttggggcattgccaccacctgtcagctcctttccgggactttcgctttccccctccctattgccacggcggaactcatcgccgcctgccttgcccgctgctggacaggggctcggctgttgggcactgacaattccgtggtgttgtcggggaagctgacgtcctttccatggctgctcgcctgtgttgccacctggattctgcgcgggacgtccttctgctacgtcccttcggccctcaatccagcggaccttccttcccgcggcctgctgccggctctgcggcctcttccgcgtcttcgccttcgccctcagacgagtcggatctccctttgggccgcctccccgcatcggactagagagatccagacatgataagatacattgatgagtttggacaaaccacaactagaatgcagtgaaaaaaatgctttatttgtgaaatttgtgatgctattgctttatttgtaaccattataagctgcaataaacaagttaacaacaacaattgcattcattttatgtttcaggttcagggggaggtgtgggaggttttttagtcgactagagctcgctgatcagcctcgactgtgccttctagttgccagccatctgttgtttgcccctcccccgtgccttccttgaccctggaaggtgccactcccactgtcctttcctaataaaatgaggaaattgcatcgcattgtctgagtaggtgtcattctattctggggggtggggtggggcaggacagcaagggggaggattgggaagacaatagcaggcatgctggggagagatctgaggaacccctagtgatggagttggccactccctctctgcgcgctcgctcgctcactgaggccgggcgaccaaaggtcgcccgacgcccgggctttgcccgggcggcctcagtgagcgagcgagcgcgcagagagggagtggcccccccccccccccctgcagcctgcattaatgaatcggccaacgcgcggggagaggcggtttgcgtattgggcgctcttccgcttcctcgctcactgactcgctgcgctcggtcgttcggctgcggcgagcggtatcagctcactcaaaggcggtaatacggttatccacagaatcaggggataacgcaggaaagaacatgtgagcaaaaggccagcaaaaggccaggaaccgtaaaaaggccgcgttgctggcgtttttccataggctccgcccccctgacgagcatcacaaaaatcgacgctcaagtcagaggtggcgaaacccgacaggactataaagataccaggcgtttccccctggaagctccctcgtgcgctctcctgttccgaccctgccgcttaccggatacctgtccgcctttctcccttcgggaagcgtggcgctttctcatagctcacgctgtaggtatctcagttcggtgtaggtcgttcgctccaagctgggctgtgtgcacgaaccccccgttcagcccgaccgctgcgccttatccggtaactatcgtcttgagtccaacccggtaagacacgacttatcgccactggcagcagccactggtaacaggattagcagagcgaggtatgtaggcggtgctacagagttcttgaagtggtggcctaactacggctacactagaagaacagtatttggtatctgcgctctgctgaagccagttaccttcggaaaaagagttggtagctcttgatccggcaaacaaaccaccgctggtagcggtggtttttttgtttgcaagcagcagattacgcgcagaaaaaaaggatctcaagaagatcctttgatcttttctacggggtctgacgctcagtggaacgaaaactcacgttaagggattttggtcatgagattatcaaaaaggatcttcacctagatccttttaaattaaaaatgaagttttaaatcaatctaaagtatatatgagtaaacttggtctgacagttaccaatgcttaatcagtgaggcacctatctcagcgatctgtctatttcgttcatccatagttgcctgactccccgtcgtgtagataactacgatacgggagggcttaccatctggccccagtgctgcaatgataccgcgagacccacgctcaccggctccagatttatcagcaataaaccagccagccggaagggccgagcgcagaagtggtcctgcaactttatccgcctccatccagtctattaattgttgccgggaagctagagtaagtagttcgccagttaatagtttgcgcaacgttgttgccattgctacaggcatcgtggtgtcacgctcgtcgtttggtatggcttcattcagctccggttcccaacgatcaaggcgagttacatgatcccccatgttgtgcaaaaaagcggttagctccttcggtcctccgatcgttgtcagaagtaagttggccgcagtgttatcactcatggttatggcagcactgcataattctcttactgtcatgccatccgtaagatgcttttctgtgactggtgagtactcaaccaagtcattctgagaatagtgtatgcggcgaccgagttgctcttgcccggcgtcaatacgggataataccgcgccacatagcagaactttaaaagtgctcatcattggaaaacgttcttcggggcgaaaactctcaaggatcttaccgctgttgagatccagttcgatgtaacccactcgtgcacccaactgatcttcagcatcttttactttcaccagcgtttctgggtgagcaaaaacaggaaggcaaaatgccgcaaaaaagggaataagggcgacacggaaatgttgaatactcatactcttcctttttcaatattattgaagcatttatcagggttattgtctcatgagcggatacatatttgaatgtatttagaaaaataaacaaataggggttccgcgcacatttccccgaaaagtgccacctgacgtctaagaaaccattattatcatgacattaacctataaaaataggcgtatcacgaggccctttcgtctcgcgcgtttcggtgatgacggtgaaaacctctgacacatgcagctcccggagacggtcacagcttgtctgtaagcggatgccgggagcagacaagcccgtcagggcgcgtcagcgggtgttggcgggtgtcggggctggcttaactatgcggcatcagagcagattgtactgagagtgcaccatatgcggtgtgaaataccgcacagatgcgtaaggagaaaataccgcatcaggaaattgtaagcgttaatattttgttaaaattcgcgttaaatttttgttaaatcagctcattttttaaccaataggccgaaatcggcaaaatcccttataaatcaaaagaatagaccgagatagggttgagtgttgttccagtttggaacaagagtccactattaaagaacgtggactccaacgtcaaagggcgaaaaaccgtctatcagggcgatggcccactacgtgaaccatcaccctaatcaagttttttggggtcgaggtgccgtaaagcactaaatcggaaccctaaagggagcccccgatttagagcttgacggggaaagccggcgaacgtggcgagaaaggaagggaagaaagcgaaaggagcgggcgctagggcgctggcaagtgtagcggtcacgctgcgcgtaaccaccacacccgccgcgcttaatgcgccgctacagggcgcgtccattcgccattcaggctgcgcaactgttgggaagggcgatcggtgcgggcctcttcgctattacgccaggctgcagggggggggggggg

SEQ ID NO: 9901 - DNA, 143 bp, synthetic construct
  misc_feature 1..143: note = AAV-CBA-ABCD1-WPRE, 5'ITR
  source 1..143: mol_type = other DNA
ggccactccctctctgcgcgctcgctcgctcactgaggccgcccgggcaaagcccgggcgtcgggcgacctttggtcgcccggcctcagtgagcgagcgagcgcgcagagagggagtggccaactccatcactaggggttcct

SEQ ID NO: 9902-9904 - skipped (3 entries)

SEQ ID NO: 9905 - DNA, 366 bp, synthetic construct
  misc_feature 1..366: note = AAV-CBA-ABCD1-WPRE, CMV Enhancer
  source 1..366: mol_type = other DNA
ctagttattaatagtaatcaattacggggtcattagttcatagcccatatatggagttccgcgttacataacttacggtaaatggcccgcctggctgaccgcccaacgacccccgcccattgacgtcaataatgacgtatgttcccatagtaacgccaatagggactttccattgacgtcaatgggtggagtatttacggtaaactgcccacttggcagtacatcaagtgtatcatatgccaagtacgccccctattgacgtcaatgacggtaaatggcccgcctggcattatgcccagtacatgaccttatgggactttcctacttggcagtacatctacgtattagtcatcgctattaccatgg

SEQ ID NO: 9906 - skipped

SEQ ID NO: 9907 - DNA, 278 bp, synthetic construct; identical to SEQ ID NO: 10
  misc_feature 1..278: note = AAV-CBA-ABCD1-WPRE, CBA Promoter
  source 1..278: mol_type = other DNA

SEQ ID NO: 9908 - DNA, 93 bp, synthetic construct; identical to SEQ ID NO: 11
  misc_feature 1..93: note = AAV-CBA-ABCD1-WPRE, beta actin Exon
  source 1..93: mol_type = other DNA

SEQ ID NO: 9909 - DNA, 155 bp, synthetic construct
  misc_feature 1..155: note = AAV-CBA-ABCD1-WPRE, Chimeric Intron
  source 1..155: mol_type = other DNA
gtgagcgggcgggacggcccttctcctccgggctgtaattagcgcttggtttaatgacggcttgtttcttttctgtggctgcgtgaaagccttgaggggctccgggagctagagcctctgctaaccatgttcatgccttcttctttttcctacag

SEQ ID NO: 9910 - DNA, 117 bp, synthetic construct
  misc_feature 1..117: note = AAV-CBA-ABCD1-WPRE, hABCD1 5' UTR
  source 1..117: mol_type = other DNA
tttccagttgcctagacaacaggcccagggtcagagcaacaatccttccagccacctgcctcaactgctgccccaggcaccagccccagtccctacgcggcagccagcccaggtgac

SEQ ID NO: 9911 - skipped

SEQ ID NO: 9912 - DNA, 2238 bp, synthetic construct; identical to SEQ ID NO: 204
  misc_feature 1..2238: note = AAV-CBA-ABCD1-WPRE, ABCD1
  source 1..2238: mol_type = other DNA

SEQ ID NO: 9913 - DNA, 49 bp, synthetic construct
  misc_feature 1..49: note = AAV-CBA-ABCD1-WPRE, hABCD1 3' UTR
  source 1..49: mol_type = other DNA
cacaaccgtccccggcccctgccccgcccccaagctcggatcacatgaa

SEQ ID NO: 9914 - DNA, 197 bp, synthetic construct
  misc_feature 1..197: note = AAV-CBA-ABCD1-WPRE, SV40 pA
  source 1..197: mol_type = other DNA
gatccagacatgataagatacattgatgagtttggacaaaccacaactagaatgcagtgaaaaaaatgctttatttgtgaaatttgtgatgctattgctttatttgtaaccattataagctgcaataaacaagttaacaacaacaattgcattcattttatgtttcaggttcagggggaggtgtgggaggtttttta

SEQ ID NO: 9915 - skipped

SEQ ID NO: 9916 - DNA, 208 bp, synthetic construct
  misc_feature 1..208: note = AAV-CBA-ABCD1-WPRE, bGHpA
  source 1..208: mol_type = other DNA
ctgtgccttctagttgccagccatctgttgtttgcccctcccccgtgccttccttgaccctggaaggtgccactcccactgtcctttcctaataaaatgaggaaattgcatcgcattgtctgagtaggtgtcattctattctggggggtggggtggggcaggacagcaagggggaggattgggaagacaatagcaggcatgctgggga

SEQ ID NO: 9917 - skipped

SEQ ID NO: 9918 - DNA, 143 bp, synthetic construct
  misc_feature 1..143: note = AAV-CBA-ABCD1-WPRE, 3'ITR
  source 1..143: mol_type = other DNA
aggaacccctagtgatggagttggccactccctctctgcgcgctcgctcgctcactgaggccgggcgaccaaaggtcgcccgacgcccgggctttgcccgggcggcctcagtgagcgagcgagcgcgcagagagggagtggcc

SEQ ID NO: 9919-9934 - skipped (16 entries)

SEQ ID NO: 9935 - DNA, 434 bp, synthetic construct; identical to SEQ ID NO: 206
  misc_feature 1..434: note = AAV-CBA-ABCD1-WPRE, Total polyA
  source 1..434: mol_type = other DNA

SEQ ID NO: 9936-9949 - skipped (14 entries)

SEQ ID NO: 9950 - DNA, 4780 bp, synthetic construct
  misc_feature 1..4780: note = AAV-CBA-ABCD1-WPRE, ITR-ITR
  source 1..4780: mol_type = other DNA
ggccactccctctctgcgcgctcgctcgctcactgaggccgcccgggcaaagcccgggcgtcgggcgacctttggtcgcccggcctcagtgagcgagcgagcgcgcagagagggagtggccaactccatcactaggggttcctcagatctgaattcggtacctagttattaatagtaatcaattacggggtcattagttcatagcccatatatggagttccgcgttacataacttacggtaaatggcccgcctggctgaccgcccaacgacccccgcccattgacgtcaataatgacgtatgttcccatagtaacgccaatagggactttccattgacgtcaatgggtggagtatttacggtaaactgcccacttggcagtacatcaagtgtatcatatgccaagtacgccccctattgacgtcaatgacggtaaatggcccgcctggcattatgcccagtacatgaccttatgggactttcctacttggcagtacatctacgtattagtcatcgctattaccatggtcgaggtgagccccacgttctgcttcactctccccatctcccccccctccccacccccaattttgtatttatttattttttaattattttgtgcagcgatgggggcggggggggggggggggcgcgcgccaggcggggcggggcggggcgaggggcggggcggggcgaggcggagaggtgcggcggcagccaatcagagcggcgcgctccgaaagtttccttttatggcgaggcggcggcggcggcggccctataaaaagcgaagcgcgcggcgggcgggagtcgctgcgcgctgccttcgccccgtgccccgctccgccgccgcctcgcgccgcccgccccggctctgactgaccgcgttactcccacaggtgagcgggcgggacggcccttctcctccgggctgtaattagcgcttggtttaatgacggcttgtttcttttctgtggctgcgtgaaagccttgaggggctccgggagctagagcctctgctaaccatgttcatgccttcttctttttcctacagctcctgggcaacgtgctggttattgtgctgtctcatcattttggcaaagaattcctcgaagatccgaaggggttcaagctttccagttgcctagacaacaggcccagggtcagagcaacaatccttccagccacctgcctcaactgctgccccaggcaccagccccagtccctacgcggcagccagcccaggtgacatgccggtgctctccaggccccggccctggcgggggaacacgctgaagcgcacggccgtgctcctggccctcgcggcctatggagcccacaaagtctaccccttggtgcgccagtgcctggccccggccaggggtcttcaggcgcccgccggggagcccacgcaggaggcctccggggtcgcggcggccaaagctggcatgaaccgggtattcctgcagcggctcctgtggctcctgcggctgctgttcccccgggtcctgtgccgggagacggggctgctggccctgcactcggccgccttggtgagccgcaccttcctgtcggtgtatgtggcccgcctggacggaaggctggcccgctgcatcgtccgcaaggacccgcgggcttttggctggcagctgctgcagtggctcctcatcgccctccctgctaccttcgtcaacagtgccatccgttacctggagggccaactggccctgtcgttccgcagccgtctggtggcccacgcctaccgcctctacttctcccagcagacctactaccgggtcagcaacatggacgggcggcttcgcaaccctgaccagtctctgacggaggacgtggtggcctttgcggcctctgtggcccacctctactccaacctgaccaagccactcctggacgtggctgtgacttcctacaccctgcttcgggcggcccgctcccgtggagccggcacagcctggccctcggccatcgccggcctcgtggtgttcctcacggccaacgtgctgcgggccttctcgcccaagttcggggagctggtggcagaggaggcgcggcggaagggggagctgcgctacatgcactcgcgtgtggtggccaactcggaggagatcgccttctatgggggccatgaggtggagctggccctgctacagcgctcctaccaggacctggcctcgcagatcaacctcatccttctggaacgcctgtggtatgttatgctggagcagttcctcatgaagtatgtgtggagcgcctcgggcctgctcatggtggctgtccccatcatcactgccactggctactcagagtcagatgcagaggccgtgaagaaggcagccttggaaaagaaggaggaggagctggtgagcgagcgcacagaagccttcactattgcccgcaacctcctgacagcggctgcagatgccattgagcggatcatgtcgtcgtacaaggaggtgacggagctggctggctacacagcccgggtgcacgagatgttccaggtatttgaagatgttcagcgctgtcacttcaagaggcccagggagctagaggacgctcaggcggggtctgggaccataggccggtctggtgtccgtgtggagggccccctgaagatccgaggccaggtggtggatgtggaacaggggatcatctgcgagaacatccccatcgtcacgccctcaggagaggtggtggtggccagcctcaacatcagggtggaggaaggcatgcatctgctcatcacaggccccaatggctgcggcaagagctccctgttccggatcctgggtgggctctggcccacgtacggtggtgtgctctacaagcccccaccccagcgcatgttctacatcccgcagaggccctacatgtctgtgggctccctgcgtgaccaggtgatctacccggactcagtggaggacatgcaaaggaagggctactcggagcaggacctggaagccatcctggacgtcgtgcacctgcaccacatcctgcagcgggagggaggttgggaggctatgtgtgactggaaggacgtcctgtcgggtggcgagaagcagagaatcggcatggcccgcatgttctaccacaggcccaagtacgccctcctggatgaatgcaccagcgccgtgagcatcgacgtggaaggcaagatcttccaggcggccaaggacgcgggcattgccctgctctccatcacccaccggccctccctgtggaaataccacacacacttgctacagttcgatggggagggcggctggaagttcgagaagctggactcagctgcccgcctgagcctgacggaggagaagcagcggctggagcagcagctggcgggcattcccaagatgcagcggcgcctccaggagctctgccagatcctgggcgaggccgtggccccagcgcatgtgccggcacctagcccgcaaggccctggtggcctccagggtgcctccacctgacacaaccgtccccggcccctgccccgcccccaagctcggatcacatgaattctgcagatatccagcacagtggcggccgctcgagctagcggccgctctagaagataatcaacctctggattacaaaatttgtgaaagattgactggtattcttaactatgttgctccttttacgctatgtggatacgctgctttaatgcctttgtatcatgctattgcttcccgtatggctttcattttctcctccttgtataaatcctggttgctgtctctttatgaggagttgtggcccgttgtcaggcaacgtggcgtggtgtgcactgtgtttgctgacgcaacccccactggttggggcattgccaccacctgtcagctcctttccgggactttcgctttccccctccctattgccacggcggaactcatcgccgcctgccttgcccgctgctggacaggggctcggctgttgggcactgacaattccgtggtgttgtcggggaagctgacgtcctttccatggctgctcgcctgtgttgccacctggattctgcgcgggacgtccttctgctacgtcccttcggccctcaatccagcggaccttccttcccgcggcctgctgccggctctgcggcctcttccgcgtcttcgccttcgccctcagacgagtcggatctccctttgggccgcctccccgcatcggactagagagatccagacatgataagatacattgatgagtttggacaaaccacaactagaatgcagtgaaaaaaatgctttatttgtgaaatttgtgatgctattgctttatttgtaaccattataagctgcaataaacaagttaacaacaacaattgcattcattttatgtttcaggttcagggggaggtgtgggaggttttttagtcgactagagctcgctgatcagcctcgactgtgccttctagttgccagccatctgttgtttgcccctcccccgtgccttccttgaccctggaaggtgccactcccactgtcctttcctaataaaatgaggaaattgcatcgcattgtctgagtaggtgtcattctattctggggggtggggtggggcaggacagcaagggggaggattgggaagacaatagcaggcatgctggggagagatctgaggaacccctagtgatggagttggccactccctctctgcgcgctcgctcgctcactgaggccgggcgaccaaaggtcgcccgacgcccgggctttgcccgggcggcctcagtgagcgagcgagcgcgcagagagggagtggcc

SEQ ID NO: 9951-9959 - skipped (9 entries)

SEQ ID NO: 9960 - DNA, 4782 bp, synthetic construct
  misc_feature 1..4782: note = AAV-CBA-ABCD1-WPRE, rAAV vector genome
  source 1..4782: mol_type = other DNA
tggccactccctctctgcgcgctcgctcgctcactgaggccgcccgggcaaagcccgggcgtcgggcgacctttggtcgcccggcctcagtgagcgagcgagcgcgcagagagggagtggccaactccatcactaggggttcctcagatctgaattcggtacctagttattaatagtaatcaattacggggtcattagttcatagcccatatatggagttccgcgttacataacttacggtaaatggcccgcctggctgaccgcccaacgacccccgcccattgacgtcaataatgacgtatgttcccatagtaacgccaatagggactttccattgacgtcaatgggtggagtatttacggtaaactgcccacttggcagtacatcaagtgtatcatatgccaagtacgccccctattgacgtcaatgacggtaaatggcccgcctggcattatgcccagtacatgaccttatgggactttcctacttggcagtacatctacgtattagtcatcgctattaccatggtcgaggtgagccccacgttctgcttcactctccccatctcccccccctccccacccccaattttgtatttatttattttttaattattttgtgcagcgatgggggcggggggggggggggggcgcgcgccaggcggggcggggcggggcgaggggcggggcggggcgaggcggagaggtgcggcggcagccaatcagagcggcgcgctccgaaagtttccttttatggcgaggcggcggcggcggcggccctataaaaagcgaagcgcgcggcgggcgggagtcgctgcgcgctgccttcgccccgtgccccgctccgccgccgcctcgcgccgcccgccccggctctgactgaccgcgttactcccacaggtgagcgggcgggacggcccttctcctccgggctgtaattagcgcttggtttaatgacggcttgtttcttttctgtggctgcgtgaaagccttgaggggctccgggagctagagcctctgctaaccatgttcatgccttcttctttttcctacagctcctgggcaacgtgctggttattgtgctgtctcatcattttggcaaagaattcctcgaagatccgaaggggttcaagctttccagttgcctagacaacaggcccagggtcagagcaacaatccttccagccacctgcctcaactgctgccccaggcaccagccccagtccctacgcggcagccagcccaggtgacatgccggtgctctccaggccccggccctggcgggggaacacgctgaagcgcacggccgtgctcctggccctcgcggcctatggagcccacaaagtctaccccttggtgcgccagtgcctggccccggccaggggtcttcaggcgcccgccggggagcccacgcaggaggcctccggggtcgcggcggccaaagctggcatgaaccgggtattcctgcagcggctcctgtggctcctgcggctgctgttcccccgggtcctgtgccgggagacggggctgctggccctgcactcggccgccttggtgagccgcaccttcctgtcggtgtatgtggcccgcctggacggaaggctggcccgctgcatcgtccgcaaggacccgcgggcttttggctggcagctgctgcagtggctcctcatcgccctccctgctaccttcgtcaacagtgccatccgttacctggagggccaactggccctgtcgttccgcagccgtctggtggcccacgcctaccgcctctacttctcccagcagacctactaccgggtcagcaacatggacgggcggcttcgcaaccctgaccagtctctgacggaggacgtggtggcctttgcggcctctgtggcccacctctactccaacctgaccaagccactcctggacgtggctgtgacttcctacaccctgcttcgggcggcccgctcccgtggagccggcacagcctggccctcggccatcgccggcctcgtggtgttcctcacggccaacgtgctgcgggccttctcgcccaagttcggggagctggtggcagaggaggcgcggcggaagggggagctgcgctacatgcactcgcgtgtggtggccaactcggaggagatcgccttctatgggggccatgaggtggagctggccctgctacagcgctcctaccaggacctggcctcgcagatcaacctcatccttctggaacgcctgtggtatgttatgctggagcagttcctcatgaagtatgtgtggagcgcctcgggcctgctcatggtggctgtccccatcatcactgccactggctactcagagtcagatgcagaggccgtgaagaaggcagccttggaaaagaaggaggaggagctggtgagcgagcgcacagaagccttcactattgcccgcaacctcctgacagcggctgcagatgccattgagcggatcatgtcgtcgtacaaggaggtgacggagctggctggctacacagcccgggtgcacgagatgttccaggtatttgaagatgttcagcgctgtcacttcaagaggcccagggagctagaggacgctcaggcggggtctgggaccataggccggtctggtgtccgtgtggagggccccctgaagatccgaggccaggtggtggatgtggaacaggggatcatctgcgagaacatccccatcgtcacgccctcaggagaggtggtggtggccagcctcaacatcagggtggaggaaggcatgcatctgctcatcacaggccccaatggctgcggcaagagctccctgttccggatcctgggtgggctctggcccacgtacggtggtgtgctctacaagcccccaccccagcgcatgttctacatcccgcagaggccctacatgtctgtgggctccctgcgtgaccaggtgatctacccggactcagtggaggacatgcaaaggaagggctactcggagcaggacctggaagccatcctggacgtcgtgcacctgcaccacatcctgcagcgggagggaggttgggaggctatgtgtgactggaaggacgtcctgtcgggtggcgagaagcagagaatcggcatggcccgcatgttctaccacaggcccaagtacgccctcctggatgaatgcaccagcgccgtgagcatcgacgtggaaggcaagatcttccaggcggccaaggacgcgggcattgccctgctctccatcacccaccggccctccctgtggaaataccacacacacttgctacagttcgatggggagggcggctggaagttcgagaagctggactcagctgcccgcctgagcctgacggaggagaagcagcggctggagcagcagctggcgggcattcccaagatgcagcggcgcctccaggagctctgccagatcctgggcgaggccgtggccccagcgcatgtgccggcacctagcccgcaaggccctggtggcctccagggtgcctccacctgacacaaccgtccccggcccctgccccgcccccaagctcggatcacatgaattctgcagatatccagcacagtggcggccgctcgagctagcggccgctctagaagataatcaacctctggattacaaaatttgtgaaagattgactggtattcttaactatgttgctccttttacgctatgtggatacgctgctttaatgcctttgtatcatgctattgcttcccgtatggctttcattttctcctccttgtataaatcctggttgctgtctctttatgaggagttgtggcccgttgtcaggcaacgtggcgtggtgtgcactgtgtttgctgacgcaacccccactggttggggcattgccaccacctgtcagctcctttccgggactttcgctttccccctccctattgccacggcggaactcatcgccgcctgccttgcccgctgctggacaggggctcggctgttgggcactgacaattccgtggtgttgtcggggaagctgacgtcctttccatggctgctcgcctgtgttgccacctggattctgcgcgggacgtccttctgctacgtcccttcggccctcaatccagcggaccttccttcccgcggcctgctgccggctctgcggcctcttccgcgtcttcgccttcgccctcagacgagtcggatctccctttgggccgcctccccgcatcggactagagagatccagacatgataagatacattgatgagtttggacaaaccacaactagaatgcagtgaaaaaaatgctttatttgtgaaatttgtgatgctattgctttatttgtaaccattataagctgcaataaacaagttaacaacaacaattgcattcattttatgtttcaggttcagggggaggtgtgggaggttttttagtcgactagagctcgctgatcagcctcgactgtgccttctagttgccagccatctgttgtttgcccctcccccgtgccttccttgaccctggaaggtgccactcccactgtcctttcctaataaaatgaggaaattgcatcgcattgtctgagtaggtgtcattctattctggggggtggggtggggcaggacagcaagggggaggattgggaagacaatagcaggcatgctggggagagatctgaggaacccctagtgatggagttggccactccctctctgcgcgctcgctcgctcactgaggccgggcgaccaaaggtcgcccgacgcccgggctttgcccgggcggcctcagtgagcgagcgagcgcgcagagagggagtggcca

SEQ ID NO: 9961-9974 - skipped (14 entries)

SEQ ID NO: 9975 - DNA, 590 bp, synthetic construct
  misc_feature 1..590: note = AAV-CBA-ABCD1-WPRE, WPRE
  source 1..590: mol_type = other DNA
taatcaacctctggattacaaaatttgtgaaagattgactggtattcttaactatgttgctccttttacgctatgtggatacgctgctttaatgcctttgtatcatgctattgcttcccgtatggctttcattttctcctccttgtataaatcctggttgctgtctctttatgaggagttgtggcccgttgtcaggcaacgtggcgtggtgtgcactgtgtttgctgacgcaacccccactggttggggcattgccaccacctgtcagctcctttccgggactttcgctttccccctccctattgccacggcggaactcatcgccgcctgccttgcccgctgctggacaggggctcggctgttgggcactgacaattccgtggtgttgtcggggaagctgacgtcctttccatggctgctcgcctgtgttgccacctggattctgcgcgggacgtccttctgctacgtcccttcggccctcaatccagcggaccttccttcccgcggcctgctgccggctctgcggcctcttccgcgtcttcgccttcgccctcagacgagtcggatctccctttgggccgcctccccgc

SEQ ID NO: 9976-9984 - skipped (9 entries)

SEQ ID NO: 9985 - DNA, 54 bp, synthetic construct
  misc_feature 1..54: note = AAV-CBA-ABCD1-WPRE, Rabbit beta-globin exon
  source 1..54: mol_type = other DNA
ctcctgggcaacgtgctggttattgtgctgtctcatcattttggcaaagaattc

SEQ ID NO: 9986-9999 - skipped (14 entries)

SEQ ID NO: 10000 - DNA, 7638 bp, synthetic construct
  misc_feature 1..7638: note = AAV-CBA-ABCD1-WPRE (Xinact), full plasmid
  source 1..7638: mol_type = other DNA
ggccactccctctctgcgcgctcgctcgctcactgaggccgcccgggcaaagcccgggcgtcgggcgacctttggtcgcccggcctcagtgagcgagcgagcgcgcagagagggagtggccaactccatcactaggggttcctcagatctgaattcggtacctagttattaatagtaatcaattacggggtcattagttcatagcccatatatggagttccgcgttacataacttacggtaaatggcccgcctggctgaccgcccaacgacccccgcccattgacgtcaataatgacgtatgttcccatagtaacgccaatagggactttccattgacgtcaatgggtggagtatttacggtaaactgcccacttggcagtacatcaagtgtatcatatgccaagtacgccccctattgacgtcaatgacggtaaatggcccgcctggcattatgcccagtacatgaccttatgggactttcctacttggcagtacatctacgtattagtcatcgctattaccatggtcgaggtgagccccacgttctgcttcactctccccatctcccccccctccccacccccaattttgtatttatttattttttaattattttgtgcagcgatgggggcggggggggggggggggcgcgcgccaggcggggcggggcggggcgaggggcggggcggggcgaggcggagaggtgcggcggcagccaatcagagcggcgcgctccgaaagtttccttttatggcgaggcggcggcggcggcggccctataaaaagcgaagcgcgcggcgggcgggagtcgctgcgcgctgccttcgccccgtgccccgctccgccgccgcctcgcgccgcccgccccggctctgactgaccgcgttactcccacaggtgagcgggcgggacggcccttctcctccgggctgtaattagcgcttggtttaatgacggcttgtttcttttctgtggctgcgtgaaagccttgaggggctccgggagctagagcctctgctaaccatgttcatgccttcttctttttcctacagctcctgggcaacgtgctggttattgtgctgtctcatcattttggcaaagaattcctcgaagatccgaaggggttcaagctttccagttgcctagacaacaggcccagggtcagagcaacaatccttccagccacctgcctcaactgctgccccaggcaccagccccagtccctacgcggcagccagcccaggtgacatgccggtgctctccaggccccggccctggcgggggaacacgctgaagcgcacggccgtgctcctggccctcgcggcctatggagcccacaaagtctaccccttggtgcgccagtgcctggccccggccaggggtcttcaggcgcccgccggggagcccacgcaggaggcctccggggtcgcggcggccaaagctggcatgaaccgggtattcctgcagcggctcctgtggctcctgcggctgctgttcccccgggtcctgtgccgggagacggggctgctggccctgcactcggccgccttggtgagccgcaccttcctgtcggtgtatgtggcccgcctggacggaaggctggcccgctgcatcgtccgcaaggacccgcgggcttttggctggcagctgctgcagtggctcctcatcgccctccctgctaccttcgtcaacagtgccatccgttacctggagggccaactggccctgtcgttccgcagccgtctggtggcccacgcctaccgcctctacttctcccagcagacctactaccgggtcagcaacatggacgggcggcttcgcaaccctgaccagtctctgacggaggacgtggtggcctttgcggcctctgtggcccacctctactccaacctgaccaagccactcctggacgtggctgtgacttcctacaccctgcttcgggcggcccgctcccgtggagccggcacagcctggccctcggccatcgccggcctcgtggtgttcctcacggccaacgtgctgcgggccttctcgcccaagttcggggagctggtggcagaggaggcgcggcggaagggggagctgcgctacatgcactcgcgtgtggtggccaactcggaggagatcgccttctatgggggccatgaggtggagctggccctgctacagcgctcctaccaggacctggcctcgcagatcaacctcatccttctggaacgcctgtggtatgttatgctggagcagttcctcatgaagtatgtgtggagcgcctcgggcctgctcatggtggctgtccccatcatcactgccactggctactcagagtcagatgcagaggccgtgaagaaggcagccttggaaaagaaggaggaggagctggtgagcgagcgcacagaagccttcactattgcccgcaacctcctgacagcggctgcagatgccattgagcggatcatgtcgtcgtacaaggaggtgacggagctggctggctacacagcccgggtgcacgagatgttccaggtatttgaagatgttcagcgctgtcacttcaagaggcccagggagctagaggacgctcaggcggggtctgggaccataggccggtctggtgtccgtgtggagggccccctgaagatccgaggccaggtggtggatgtggaacaggggatcatctgcgagaacatccccatcgtcacgccctcaggagaggtggtggtggccagcctcaacatcagggtggaggaaggcatgcatctgctcatcacaggccccaatggctgcggcaagagctccctgttccggatcctgggtgggctctggcccacgtacggtggtgtgctctacaagcccccaccccagcgcatgttctacatcccgcagaggccctacatgtctgtgggctccctgcgtgaccaggtgatctacccggactcagtggaggacatgcaaaggaagggctactcggagcaggacctggaagccatcctggacgtcgtgcacctgcaccacatcctgcagcgggagggaggttgggaggctatgtgtgactggaaggacgtcctgtcgggtggcgagaagcagagaatcggcatggcccgcatgttctaccacaggcccaagtacgccctcctggatgaatgcaccagcgccgtgagcatcgacgtggaaggcaagatcttccaggcggccaaggacgcgggcattgccctgctctccatcacccaccggccctccctgtggaaataccacacacacttgctacagttcgatggggagggcggctggaagttcgagaagctggactcagctgcccgcctgagcctgacggaggagaagcagcggctggagcagcagctggcgggcattcccaagatgcagcggcgcctccaggagctctgccagatcctgggcgaggccgtggccccagcgcatgtgccggcacctagcccgcaaggccctggtggcctccagggtgcctccacctgacacaaccgtccccggcccctgccccgcccccaagctcggatcacatgaattctgcagatatccagcacagtggcggccgctcgagctagcggccgctctagaagataatcaacctctggattacaaaatttgtgaaagattgactggtattcttaactatgttgctccttttacgctatgtggatacgctgctttaatgcctttgtatcatgctattgcttcccgtatggctttcattttctcctccttgtataaatcctggttgctgtctctttatgaggagttgtggcccgttgtcaggcaacgtggcgtggtgtgcactgtgtttgctgacgcaacccccactggttggggcattgccaccacctgtcagctcctttccgggactttcgctttccccctccctattgccacggcggaactcatcgccgcctgccttgcccgctgctggacaggggctcggctgttgggcactgacaattccgtggtgttgtcggggaaatcatcgtcctttccttggctgctcgcctgtgttgccacctggattctgcgcgggacgtccttctgctacgtcccttcggccctcaatccagcggaccttccttcccgcggcctgctgccggctctgcggcctcttccgcgtcttcgccttcgccctcagacgagtcggatctccctttgggccgcctccccgcatcggactagagagatccagacatgataagatacattgatgagtttggacaaaccacaactagaatgcagtgaaaaaaatgctttatttgtgaaatttgtgatgctattgctttatttgtaaccattataagctgcaataaacaagttaacaacaacaattgcattcattttatgtttcaggttcagggggaggtgtgggaggttttttagtcgactagagctcgctgatcagcctcgactgtgccttctagttgccagccatctgttgtttgcccctcccccgtgccttccttgaccctggaaggtgccactcccactgtcctttcctaataaaatgaggaaattgcatcgcattgtctgagtaggtgtcattctattctggggggtggggtggggcaggacagcaagggggaggattgggaagacaatagcaggcatgctggggagagatctgaggaacccctagtgatggagttggccactccctctctgcgcgctcgctcgctcactgaggccgggcgaccaaaggtcgcccgacgcccgggctttgcccgggcggcctcagtgagcgagcgagcgcgcagagagggagtggcccccccccccccccctgcagcctgcattaatgaatcggccaacgcgcggggagaggcggtttgcgtattgggcgctcttccgcttcctcgctcactgactcgctgcgctcggtcgttcggctgcggcgagcggtatcagctcactcaaaggcggtaatacggttatccacagaatcaggggataacgcaggaaagaacatgtgagcaaaaggccagcaaaaggccaggaaccgtaaaaaggccgcgttgctggcgtttttccataggctccgcccccctgacgagcatcacaaaaatcgacgctcaagtcagaggtggcgaaacccgacaggactataaagataccaggcgtttccccctggaagctccctcgtgcgctctcctgttccgaccctgccgcttaccggatacctgtccgcctttctcccttcgggaagcgtggcgctttctcatagctcacgctgtaggtatctcagttcggtgtaggtcgttcgctccaagctgggctgtgtgcacgaaccccccgttcagcccgaccgctgcgccttatccggtaactatcgtcttgagtccaacccggtaagacacgacttatcgccactggcagcagccactggtaacaggattagcagagcgaggtatgtaggcggtgctacagagttcttgaagtggtggcctaactacggctacactagaagaacagtatttggtatctgcgctctgctgaagccagttaccttcggaaaaagagttggtagctcttgatccggcaaacaaaccaccgctggtagcggtggtttttttgtttgcaagcagcagattacgcgcagaaaaaaaggatctcaagaagatcctttgatcttttctacggggtctgacgctcagtggaacgaaaactcacgttaagggattttggtcatgagattatcaaaaaggatcttcacctagatccttttaaattaaaaatgaagttttaaatcaatctaaagtatatatgagtaaacttggtctgacagttaccaatgcttaatcagtgaggcacctatctcagcgatctgtctatttcgttcatccatagttgcctgactccccgtcgtgtagataactacgatacgggagggcttaccatctggccccagtgctgcaatgataccgcgagacccacgctcaccggctccagatttatcagcaataaaccagccagccggaagggccgagcgcagaagtggtcctgcaactttatccgcctccatccagtctattaattgttgccgggaagctagagtaagtagttcgccagttaatagtttgcgcaacgttgttgccattgctacaggcatcgtggtgtcacgctcgtcgtttggtatggcttcattcagctccggttcccaacgatcaaggcgagttacatgatcccccatgttgtgcaaaaaagcggttagctccttcggtcctccgatcgttgtcagaagtaagttggccgcagtgttatcactcatggttatggcagcactgcataattctcttactgtcatgccatccgtaagatgcttttctgtgactggtgagtactcaaccaagtcattctgagaatagtgtatgcggcgaccgagttgctcttgcccggcgtcaatacgggataataccgcgccacatagcagaactttaaaagtgctcatcattggaaaacgttcttcggggcgaaaactctcaaggatcttaccgctgttgagatccagttcgatgtaacccactcgtgcacccaactgatcttcagcatcttttactttcaccagcgtttctgggtgagcaaaaacaggaaggcaaaatgccgcaaaaaagggaataagggcgacacggaaatgttgaatactcatactcttcctttttcaatattattgaagcatttatcagggttattgtctcatgagcggatacatatttgaatgtatttagaaaaataaacaaataggggttccgcgcacatttccccgaaaagtgccacctgacgtctaagaaaccattattatcatgacattaacctataaaaataggcgtatcacgaggccctttcgtctcgcgcgtttcggtgatgacggtgaaaacctctgacacatgcagctcccggagacggtcacagcttgtctgtaagcggatgccgggagcagacaagcccgtcagggcgcgtcagcgggtgttggcgggtgtcggggctggcttaactatgcggcatcagagcagattgtactgagagtgcaccatatgcggtgtgaaataccgcacagatgcgtaaggagaaaataccgcatcaggaaattgtaagcgttaatattttgttaaaattcgcgttaaatttttgttaaatcagctcattttttaaccaataggccgaaatcggcaaaatcccttataaatcaaaagaatagaccgagatagggttgagtgttgttccagtttggaacaagagtccactattaaagaacgtggactccaacgtcaaagggcgaaaaaccgtctatcagggcgatggcccactacgtgaaccatcaccctaatcaagttttttggggtcgaggtgccgtaaagcactaaatcggaaccctaaagggagcccccgatttagagcttgacggggaaagccggcgaacgtggcgagaaaggaagggaagaaagcgaaaggagcgggcgctagggcgctggcaagtgtagcggtcacgctgcgcgtaaccaccacacccgccgcgcttaatgcgccgctacagggcgcgtccattcgccattcaggctgcgcaactgttgggaagggcgatcggtgcgggcctcttcgctattacgccaggctgcagggggggggggggg

SEQ ID NO: 10001 - DNA, 143 bp, synthetic construct; identical to SEQ ID NO: 9901
  misc_feature 1..143: note = AAV-CBA-ABCD1-WPRE (Xinact), 5'ITR
  source 1..143: mol_type = other DNA

SEQ ID NO: 10002-10004 - skipped (3 entries)

SEQ ID NO: 10005 - DNA, 366 bp, synthetic construct; identical to SEQ ID NO: 9905
  misc_feature 1..366: note = AAV-CBA-ABCD1-WPRE (Xinact), CMV Enhancer
  source 1..366: mol_type = other DNA

SEQ ID NO: 10006 - skipped

SEQ ID NO: 10007 - DNA, 278 bp, synthetic construct; identical to SEQ ID NO: 10
  misc_feature 1..278: note = AAV-CBA-ABCD1-WPRE (Xinact), CBA Promoter
  source 1..278: mol_type = other DNA

SEQ ID NO: 10008 - DNA, 93 bp, synthetic construct; identical to SEQ ID NO: 11
  misc_feature 1..93: note = AAV-CBA-ABCD1-WPRE (Xinact), beta-actin Exon
  source 1..93: mol_type = other DNA

SEQ ID NO: 10009 - DNA, 155 bp, synthetic construct; identical to SEQ ID NO: 9909
  misc_feature 1..155: note = AAV-CBA-ABCD1-WPRE (Xinact), Chimeric Intron
  source 1..155: mol_type = other DNA

SEQ ID NO: 10010 - DNA, 117 bp, synthetic construct; identical to SEQ ID NO: 9910
  misc_feature 1..117: note = AAV-CBA-ABCD1-WPRE (Xinact), hABCD1 5' UTR
  source 1..117: mol_type = other DNA

SEQ ID NO: 10011 - skipped

SEQ ID NO: 10012 - DNA, 2238 bp, synthetic construct; identical to SEQ ID NO: 204
  misc_feature 1..2238: note = AAV-CBA-ABCD1-WPRE (Xinact), ABCD1
  source 1..2238: mol_type = other DNA

SEQ ID NO: 10013 - DNA, 49 bp, synthetic construct; identical to SEQ ID NO: 9913
  misc_feature 1..49: note = AAV-CBA-ABCD1-WPRE (Xinact), hABCD1 3' UTR
  source 1..49: mol_type = other DNA

SEQ ID NO: 10014 - DNA, 197 bp, synthetic construct; identical to SEQ ID NO: 9914
  misc_feature 1..197: note = AAV-CBA-ABCD1-WPRE (Xinact), SV40 pA
  source 1..197: mol_type = other DNA

SEQ ID NO: 10015 - skipped

SEQ ID NO: 10016 - DNA, 208 bp, synthetic construct; identical to SEQ ID NO: 9916
  misc_feature 1..208: note = AAV-CBA-ABCD1-WPRE (Xinact), bGHpA
  source 1..208: mol_type = other DNA

SEQ ID NO: 10017 - skipped

SEQ ID NO: 10018 - DNA, 143 bp, synthetic construct; identical to SEQ ID NO: 9918
  misc_feature 1..143: note = AAV-CBA-ABCD1-WPRE (Xinact), 3'ITR
  source 1..143: mol_type = other DNA

SEQ ID NO: 10019-10034 - skipped (16 entries)

SEQ ID NO: 10035 - DNA, 434 bp, synthetic construct; identical to SEQ ID NO: 206
  misc_feature 1..434: note = AAV-CBA-ABCD1-WPRE (Xinact), Total polyA
  source 1..434: mol_type = other DNA

SEQ ID NO: 10036-10049 - skipped (14 entries)

SEQ ID NO: 10050 - DNA, 4780 bp, synthetic construct
  misc_feature 1..4780: note = AAV-CBA-ABCD1-WPRE (Xinact), ITR-ITR
  source 1..4780: mol_type = other DNA
ggccactccctctctgcgcgctcgctcgctcactgaggccgcccgggcaaagcccgggcgtcgggcgacctttggtcgcccggcctcagtgagcgagcgagcgcgcagagagggagtggccaactccatcactaggggttcctcagatctgaattcggtacctagttattaatagtaatcaattacggggtcattagttcatagcccatatatggagttccgcgttacataacttacggtaaatggcccgcctggctgaccgcccaacgacccccgcccattgacgtcaataatgacgtatgttcccatagtaacgccaatagggactttccattgacgtcaatgggtggagtatttacggtaaactgcccacttggcagtacatcaagtgtatcatatgccaagtacgccccctattgacgtcaatgacggtaaatggcccgcctggcattatgcccagtacatgaccttatgggactttcctacttggcagtacatctacgtattagtcatcgctattaccatggtcgaggtgagccccacgttctgcttcactctccccatctcccccccctccccacccccaattttgtatttatttattttttaattattttgtgcagcgatgggggcggggggggggggggggcgcgcgccaggcggggcggggcggggcgaggggcggggcggggcgaggcggagaggtgcggcggcagccaatcagagcggcgcgctccgaaagtttccttttatggcgaggcggcggcggcggcggccctataaaaagcgaagcgcgcggcgggcgggagtcgctgcgcgctgccttcgccccgtgccccgctccgccgccgcctcgcgccgcccgccccggctctgactgaccgcgttactcccacaggtgagcgggcgggacggcccttctcctccgggctgtaattagcgcttggtttaatgacggcttgtttcttttctgtggctgcgtgaaagccttgaggggctccgggagctagagcctctgctaaccatgttcatgccttcttctttttcctacagctcctgggcaacgtgctggttattgtgctgtctcatcattttggcaaagaattcctcgaagatccgaaggggttcaagctttccagttgcctagacaacaggcccagggtcagagcaacaatccttccagccacctgcctcaactgctgccccaggcaccagccccagtccctacgcggcagccagcccaggtgacatgccggtgctctccaggccccggccctggcgggggaacacgctgaagcgcacggccgtgctcctggccctcgcggcctatggagcccacaaagtctaccccttggtgcgccagtgcctggccccggccaggggtcttcaggcgcccgccggggagcccacgcaggaggcctccggggtcgcggcggccaaagctggcatgaaccgggtattcctgcagcggctcctgtggctcctgcggctgctgttcccccgggtcctgtgccgggagacggggctgctggccctgcactcggccgccttggtgagccgcaccttcctgtcggtgtatgtggcccgcctggacggaaggctggcccgctgcatcgtccgcaaggacccgcgggcttttggctggcagctgctgcagtggctcctcatcgccctccctgctaccttcgtcaacagtgccatccgttacctggagggccaactggccctgtcgttccgcagccgtctggtggcccacgcctaccgcctctacttctcccagcagacctactaccgggtcagcaacatggacgggcggcttcgcaaccctgaccagtctctgacggaggacgtggtggcctttgcggcctctgtggcccacctctactccaacctgaccaagccactcctggacgtggctgtgacttcctacaccctgcttcgggcggcccgctcccgtggagccggcacagcctggccctcggccatcgccggcctcgtggtgttcctcacggccaacgtgctgcgggccttctcgcccaagttcggggagctggtggcagaggaggcgcggcggaagggggagctgcgctacatgcactcgcgtgtggtggccaactcggaggagatcgccttctatgggggccatgaggtggagctggccctgctacagcgctcctaccaggacctggcctcgcagatcaacctcatccttctggaacgcctgtggtatgttatgctggagcagttcctcatgaagtatgtgtggagcgcctcgggcctgctcatggtggctgtccccatcatcactgccactggctactcagagtcagatgcagaggccgtgaagaaggcagccttggaaaagaaggaggaggagctggtgagcgagcgcacagaagccttcactattgcccgcaacctcctgacagcggctgcagatgccattgagcggatcatgtcgtcgtacaaggaggtgacggagctggctggctacacagcccgggtgcacgagatgttccaggtatttgaagatgttcagcgctgtcacttcaagaggcccagggagctagaggacgctcaggcggggtctgggaccataggccggtctggtgtccgtgtggagggccccctgaagatccgaggccaggtggtggatgtggaacaggggatcatctgcgagaacatccccatcgtcacgccctcaggagaggtggtggtggccagcctcaacatcagggtggaggaaggcatgcatctgctcatcacaggccccaatggctgcggcaagagctccctgttccggatcctgggtgggctctggcccacgtacggtggtgtgctctacaagcccccaccccagcgcatgttctacatcccgcagaggccctacatgtctgtgggctccctgcgtgaccaggtgatctacccggactcagtggaggacatgcaaaggaagggctactcggagcaggacctggaagccatcctggacgtcgtgcacctgcaccacatcctgcagcgggagggaggttgggaggctatgtgtgactggaaggacgtcctgtcgggtggcgagaagcagagaatcggcatggcccgcatgttctaccacaggcccaagtacgccctcctggatgaatgcaccagcgccgtgagcatcgacgtggaaggcaagatcttccaggcggccaaggacgcgggcattgccctgctctccatcacccaccggccctccctgtggaaataccacacacacttgctacagttcgatggggagggcggctggaagttcgagaagctggactcagctgcccgcctgagcctgacggaggagaagcagcggctggagcagcagctggcgggcattcccaagatgcagcggcgcctccaggagctctgccagatcctgggcgaggccgtggccccagcgcatgtgccggcacctagcccgcaaggccctggtggcctccagggtgcctccacctgacacaaccgtccccggcccctgccccgcccccaagctcggatcacatgaattctgcagatatccagcacagtggcggccgctcgagctagcggccgctctagaagataatcaacctctggattacaaaatttgtgaaagattgactggtattcttaactatgttgctccttttacgctatgtggatacgctgctttaatgcctttgtatcatgctattgcttcccgtatggctttcattttctcctccttgtataaatcctggttgctgtctctttatgaggagttgtggcccgttgtcaggcaacgtggcgtggtgtgcactgtgtttgctgacgcaacccccactggttggggcattgccaccacctgtcagctcctttccgggactttcgctttccccctccctattgccacggcggaactcatcgccgcctgccttgcccgctgctggacaggggctcggctgttgggcactgacaattccgtggtgttgtcggggaaatcatcgtcctttccttggctgctcgcctgtgttgccacctggattctgcgcgggacgtccttctgctacgtcccttcggccctcaatccagcggaccttccttcccgcggcctgctgccggctctgcggcctcttccgcgtcttcgccttcgccctcagacgagtcggatctccctttgggccgcctccccgcatcggactagagagatccagacatgataagatacattgatgagtttggacaaaccacaactagaatgcagtgaaaaaaatgctttatttgtgaaatttgtgatgctattgctttatttgtaaccattataagctgcaataaacaagttaacaacaacaattgcattcattttatgtttcaggttcagggggaggtgtgggaggttttttagtcgactagagctcgctgatcagcctcgactgtgccttctagttgccagccatctgttgtttgcccctcccccgtgccttccttgaccctggaaggtgccactcccactgtcctttcctaataaaatgaggaaattgcatcgcattgtctgagtaggtgtcattctattctggggggtggggtggggcaggacagcaagggggaggattgggaagacaatagcaggcatgctggggagagatctgaggaacccctagtgatggagttggccactccctctctgcgcgctcgctcgctcactgaggccgggcgaccaaaggtcgcccgacgcccgggctttgcccgggcggcctcagtgagcgagcgagcgcgcagagagggagtggcc

SEQ ID NO: 10051-10059 - skipped (9 entries)

SEQ ID NO: 10060 - DNA, 4782 bp, synthetic construct
  misc_feature 1..4782: note = AAV-CBA-ABCD1-WPRE (Xinact), rAAV vector genome
  source 1..4782: mol_type = other DNA
tggccactccctctctgcgcgctcgctcgctcactgaggccgcccgggcaaagcccgggcgtcgggcgacctttggtcgcccggcctcagtgagcgagcgagcgcgcagagagggagtggccaactccatcactaggggttcctcagatctgaattcggtacctagttattaatagtaatcaattacggggtcattagttcatagcccatatatggagttccgcgttacataacttacggtaaatggcccgcctggctgaccgcccaacgacccccgcccattgacgtcaataatgacgtatgttcccatagtaacgccaatagggactttccattgacgtcaatgggtggagtatttacggtaaactgcccacttggcagtacatcaagtgtatcatatgccaagtacgccccctattgacgtcaatgacggtaaatggcccgcctggcattatgcccagtacatgaccttatgggactttcctacttggcagtacatctacgtattagtcatcgctattaccatggtcgaggtgagccccacgttctgcttcactctccccatctcccccccctccccacccccaattttgtatttatttattttttaattattttgtgcagcgatgggggcggggggggggggggggcgcgcgccaggcggggcggggcggggcgaggggcggggcggggcgaggcggagaggtgcggcggcagccaatcagagcggcgcgctccgaaagtttccttttatggcgaggcggcggcggcggcggccctataaaaagcgaagcgcgcggcgggcgggagtcgctgcgcgctgccttcgccccgtgccccgctccgccgccgcctcgcgccgcccgccccggctctgactgaccgcgttactcccacaggtgagcgggcgggacggcccttctcctccgggctgtaattagcgcttggtttaatgacggcttgtttcttttctgtggctgcgtgaaagccttgaggggctccgggagctagagcctctgctaaccatgttcatgccttcttctttttcctacagctcctgggcaacgtgctggttattgtgctgtctcatcattttggcaaagaattcctcgaagatccgaaggggttcaagctttccagttgcctagacaacaggcccagggtcagagcaacaatccttccagccacctgcctcaactgctgccccaggcaccagccccagtccctacgcggcagccagcccaggtgacatgccggtgctctccaggccccggccctggcgggggaacacgctgaagcgcacggccgtgctcctggccctcgcggcctatggagcccacaaagtctaccccttggtgcgccagtgcctggccccggccaggggtcttcaggcgcccgccggggagcccacgcaggaggcctccggggtcgcggcggccaaagctggcatgaaccgggtattcctgcagcggctcctgtggctcctgcggctgctgttcccccgggtcctgtgccgggagacggggctgctggccctgcactcggccgccttggtgagccgcaccttcctgtcggtgtatgtggcccgcctggacggaaggctggcccgctgcatcgtccgcaaggacccgcgggcttttggctggcagctgctgcagtggctcctcatcgccctccctgctaccttcgtcaacagtgccatccgttacctggagggccaactggccctgtcgttccgcagccgtctggtggcccacgcctaccgcctctacttctcccagcagacctactaccgggtcagcaacatggacgggcggcttcgcaaccctgaccagtctctgacggaggacgtggtggcctttgcggcctctgtggcccacctctactccaacctgaccaagccactcctggacgtggctgtgacttcctacaccctgcttcgggcggcccgctcccgtggagccggcacagcctggccctcggccatcgccggcctcgtggtgttcctcacggccaacgtgctgcgggccttctcgcccaagttcggggagctggtggcagaggaggcgcggcggaagggggagctgcgctacatgcactcgcgtgtggtggccaactcggaggagatcgccttctatgggggccatgaggtggagctggccctgctacagcgctcctaccaggacctggcctcgcagatcaacctcatccttctggaacgcctgtggtatgttatgctggagcagttcctcatgaagtatgtgtggagcgcctcgggcctgctcatggtggctgtccccatcatcactgccactggctactcagagtcagatgcagaggccgtgaagaaggcagccttggaaaagaaggaggaggagctggtgagcgagcgcacagaagccttcactattgcccgcaacctcctgacagcggctgcagatgccattgagcggatcatgtcgtcgtacaaggaggtgacggagctggctggctacacagcccgggtgcacgagatgttccaggtatttgaagatgttcagcgctgtcacttcaagaggcccagggagctagaggacgctcaggcggggtctgggaccataggccggtctggtgtccgtgtggagggccccctgaagatccgaggccaggtggtggatgtggaacaggggatcatctgcgagaacatccccatcgtcacgccctcaggagaggtggtggtggccagcctcaacatcagggtggaggaaggcatgcatctgctcatcacaggccccaatggctgcggcaagagctccctgttccggatcctgggtgggctctggcccacgtacggtggtgtgctctacaagcccccaccccagcgcatgttctacatcccgcagaggccctacatgtctgtgggctccctgcgtgaccaggtgatctacccggactcagtggaggacatgcaaaggaagggctactcggagcaggacctggaagccatcctggacgtcgtgcacctgcaccacatcctgcagcgggagggaggttgggaggctatgtgtgactggaaggacgtcctgtcgggtggcgagaagcagagaatcggcatggcccgcatgttctaccacaggcccaagtacgccctcctggatgaatgcaccagcgccgtgagcatcgacgtggaaggcaagatcttccaggcggccaaggacgcgggcattgccctgctctccatcacccaccggccctccctgtggaaataccacacacacttgctacagttcgatggggagggcggctggaagttcgagaagctggactcagctgcccgcctgagcctgacggaggagaagcagcggctggagcagcagctggcgggcattcccaagatgcagcggcgcctccaggagctctgccagatcctgggcgaggccgtggccccagcgcatgtgccggcacctagcccgcaaggccctggtggcctccagggtgcctccacctgacacaaccgtccccggcccctgccccgcccccaagctcggatcacatgaattctgcagatatccagcacagtggcggccgctcgagctagcggccgctctagaagataatcaacctctggattacaaaatttgtgaaagattgactggtattcttaactatgttgctccttttacgctatgtggatacgctgctttaatgcctttgtatcatgctattgcttcccgtatggctttcattttctcctccttgtataaatcctggttgctgtctctttatgaggagttgtggcccgttgtcaggcaacgtggcgtggtgtgcactgtgtttgctgacgcaacccccactggttggggcattgccaccacctgtcagctcctttccgggactttcgctttccccctccctattgccacggcggaactcatcgccgcctgccttgcccgctgctggacaggggctcggctgttgggcactgacaattccgtggtgttgtcggggaaatcatcgtcctttccttggctgctcgcctgtgttgccacctggattctgcgcgggacgtccttctgctacgtcccttcggccctcaatccagcggaccttccttcccgcggcctgctgccggctctgcggcctcttccgcgtcttcgccttcgccctcagacgagtcggatctccctttgggccgcctccccgcatcggactagagagatccagacatgataagatacattgatgagtttggacaaaccacaactagaatgcagtgaaaaaaatgctttatttgtgaaatttgtgatgctattgctttatttgtaaccattataagctgcaataaacaagttaacaacaacaattgcattcattttatgtttcaggttcagggggaggtgtgggaggttttttagtcgactagagctcgctgatcagcctcgactgtgccttctagttgccagccatctgttgtttgcccctcccccgtgccttccttgaccctggaaggtgccactcccactgtcctttcctaataaaatgaggaaattgcatcgcattgtctgagtaggtgtcattctattctggggggtggggtggggcaggacagcaagggggaggattgggaagacaatagcaggcatgctggggagagatctgaggaacccctagtgatggagttggccactccctctctgcgcgctcgctcgctcactgaggccgggcgaccaaaggtcgcccgacgcccgggctttgcccgggcggcctcagtgagcgagcgagcgcgcagagagggagtggcca

SEQ ID NO: 10061-10074 - skipped (14 entries)

SEQ ID NO: 10075 - DNA, 590 bp, synthetic construct
  misc_feature 1..590: note = AAV-CBA-ABCD1-WPRE (Xinact), WPRE (X inact)
  source 1..590: mol_type = other DNA
taatcaacctctggattacaaaatttgtgaaagattgactggtattcttaactatgttgctccttttacgctatgtggatacgctgctttaatgcctttgtatcatgctattgcttcccgtatggctttcattttctcctccttgtataaatcctggttgctgtctctttatgaggagttgtggcccgttgtcaggcaacgtggcgtggtgtgcactgtgtttgctgacgcaacccccactggttggggcattgccaccacctgtcagctcctttccgggactttcgctttccccctccctattgccacggcggaactcatcgccgcctgccttgcccgctgctggacaggggctcggctgttgggcactgacaattccgtggtgttgtcggggaaatcatcgtcctttccttggctgctcgcctgtgttgccacctggattctgcgcgggacgtccttctgctacgtcccttcggccctcaatccagcggaccttccttcccgcggcctgctgccggctctgcggcctcttccgcgtcttcgccttcgccctcagacgagtcggatctccctttgggccgcctccccgc

SEQ ID NO: 10076-10084 - skipped (9 entries)

SEQ ID NO: 10085 - DNA, 54 bp, synthetic construct; identical to SEQ ID NO: 9985
  misc_feature 1..54: note = AAV-CBA-ABCD1-WPRE (Xinact), Rabbit beta-globin exon
  source 1..54: mol_type = other DNA

SEQ ID NO: 10086-10099 - skipped (14 entries)

SEQ ID NO: 10100 - DNA, 6815 bp, synthetic construct
  misc_feature 1..6815: note = pSBT101, full plasmid
  source 1..6815: mol_type = other DNA
ggccactccctctctgcgcgctcgctcgctcactgaggccgcccgggcaaagcccgggcgtcgggcgacctttggtcgcccggcctcagtgagcgagcgagcgcgcagagagggagtggccaactccatcactaggggttcctcagatctgaattcggtacctagttattaatagtaatcaattacggggtcattagttcatagcccatatatggagttccgcgttacataacttacggtaaatggcccgcctggctgaccgcccaacgacccccgcccattgacgtcaataatgacgtatgttcccatagtaacgccaatagggactttccattgacgtcaatgggtggagtatttacggtaaactgcccacttggcagtacatcaagtgtatcatatgccaagtacgccccctattgacgtcaatgacggtaaatggcccgcctggcattatgcccagtacatgaccttatgggactttcctacttggcagtacatctacgtattagtcatcgctattaccatggtcgaggtgagccccacgttctgcttcactctccccatctcccccccctccccacccccaattttgtatttatttattttttaattattttgtgcagcgatgggggcggggggggggggggggcgcgcgccaggcggggcggggcggggcgaggggcggggcggggcgaggcggagaggtgcggcggcagccaatcagagcggcgcgctccgaaagtttccttttatggcgaggcggcggcggcggcggccctataaaaagcgaagcgcgcggcgggcgggagtcgctgcgcgctgccttcgccccgtgccccgctccgccgccgcctcgcgccgcccgccccggctctgactgaccgcgttactcccacaggtgagcgggcgggacggcccttctcctccgggctgtaattagcgcttggtttaatgacggcttgtttcttttctgtggctgcgtgaaagccttgaggggctccgggagctagagcctctgctaaccatgttcatgccttcttctttttcctacagctcctgggcaacgtgctggttattgtgctgtctcatcattttggcaaagaattcctcgaagatccgaaggggttcaagctttccagttgcctagacaacaggcccagggtcagagcaacaatccttccagccacctgcctcaactgctgccccaggcaccagccccagtccctacgcggcagccagcccaggtgacatgccggtgctctccaggccccggccctggcgggggaacacgctgaagcgcacggccgtgctcctggccctcgcggcctatggagcccacaaagtctaccccttggtgcgccagtgcctggccccggccaggggtcttcaggcgcccgccggggagcccacgcaggaggcctccggggtcgcggcggccaaagctggcatgaaccgggtattcctgcagcggctcctgtggctcctgcggctgctgttcccccgggtcctgtgccgggagacggggctgctggccctgcactcggccgccttggtgagccgcaccttcctgtcggtgtatgtggcccgcctggacggaaggctggcccgctgcatcgtccgcaaggacccgcgggcttttggctggcagctgctgcagtggctcctcatcgccctccctgctaccttcgtcaacagtgccatccgttacctggagggccaactggccctgtcgttccgcagccgtctggtggcccacgcctaccgcctctacttctcccagcagacctactaccgggtcagcaacatggacgggcggcttcgcaaccctgaccagtctctgacggaggacgtggtggcctttgcggcctctgtggcccacctctactccaacctgaccaagccactcctggacgtggctgtgacttcctacaccctgcttcgggcggcccgctcccgtggagccggcacagcctggccctcggccatcgccggcctcgtggtgttcctcacggccaacgtgctgcgggccttctcgcccaagttcggggagctggtggcagaggaggcgcggcggaagggggagctgcgctacatgcactcgcgtgtggtggccaactcggaggagatcgccttctatgggggccatgaggtggagctggccctgctacagcgctcctaccaggacctggcctcgcagatcaacctcatccttctggaacgcctgtggtatgttatgctggagcagttcctcatgaagtatgtgtggagcgcctcgggcctgctcatggtggctgtccccatcatcactgccactggctactcagagtcagatgcagaggccgtgaagaaggcagccttggaaaagaaggaggaggagctggtgagcgagcgcacagaagccttcactattgcccgcaacctcctgacagcggctgcagatgccattgagcggatcatgtcgtcgtacaaggaggtgacggagctggctggctacacagcccgggtgcacgagatgttccaggtatttgaagatgttcagcgctgtcacttcaagaggcccagggagctagaggacgctcaggcggggtctgggaccataggccggtctggtgtccgtgtggagggccccctgaagatccgaggccaggtggtggatgtggaacaggggatcatctgcgagaacatccccatcgtcacgccctcaggagaggtggtggtggccagcctcaacatcagggtggaggaaggcatgcatctgctcatcacaggccccaatggctgcggcaagagctccctgttccggatcctgggtgggctctggcccacgtacggtggtgtgctctacaagcccccaccccagcgcatgttctacatcccgcagaggccctacatgtctgtgggctccctgcgtgaccaggtgatctacccggactcagtggaggacatgcaaaggaagggctactcggagcaggacctggaagccatcctggacgtcgtgcacctgcaccacatcctgcagcgggagggaggttgggaggctatgtgtgactggaaggacgtcctgtcgggtggcgagaagcagagaatcggcatggcccgcatgttctaccacaggcccaagtacgccctcctggatgaatgcaccagcgccgtgagcatcgacgtggaaggcaagatcttccaggcggccaaggacgcgggcattgccctgctctccatcacccaccggccctccctgtggaaataccacacacacttgctacagttcgatggggagggcggctggaagttcgagaagctggactcagctgcccgcctgagcctgacggaggagaagcagcggctggagcagcagctggcgggcattcccaagatgcagcggcgcctccaggagctctgccagatcctgggcgaggccgtggccccagcgcatgtgccggcacctagcccgcaaggccctggtggcctccagggtgcctccacctgacacaaccgtccccggcccctgccccgcccccaagctcggatcacatgaattctgcagatatccagcacagtggcggccgctcgagctagcggccgctctagaaagagatccagacatgataagatacattgatgagtttggacaaaccacaactagaatgcagtgaaaaaaatgctttatttgtgaaatttgtgatgctattgctttatttgtaaccattataagctgcaataaacaagttaacaacaacaattgcattcattttatgtttcaggttcagggggaggtgtgggaggttttttagtcgactagagctcgctgatcagcctcgactgtgccttctagttgccagccatctgttgtttgcccctcccccgtgccttccttgaccctggaaggtgccactcccactgtcctttcctaataaaatgaggaaattgcatcgcattgtctgagtaggtgtcattctattctggggggtggggtggggcaggacagcaagggggaggattgggaagacaatagcaggcatgctggggagagatctgaggaacccctagtgatggagttggccactccctctctgcgcgctcgctcgctcactgaggccgggcgaccaaaggtcgcccgacgcccgggctttgcccgggcggcctcagtgagcgagcgagcgcgcagagagggagtggcccgttccatcccaatggcgcgccgagcttggctcgagcatggtcatagctgtttcctgtgtgaaattgttatccgctcacaattccacacaacatacgagccggaagcataaagtgtaaagcctggggtgcctaatgagtgagctaactcacattaattgcgttgcgctcactgcccgctttccagtcgggaaacctgtcgtgccagctgcattaatgaatcggccaacgcgcggggagaggcggtttgcgtattgggcgctcttccgcttcctcgctcactgactcgctgcgctcggtcgttcggctgcggcgagcggtatcagctcactcaaaggcggtaatacggttatccacagaatcaggggataacgcaggaaagaacatgtgagcaaaaggccagcaaaaggccaggaaccgtaaaaaggccgcgttgctggcgtttttccataggctccgcccccctgacgagcatcacaaaaatcgacgctcaagtcagaggtggcgaaacccgacaggactataaagataccaggcgtttccccctggaagctccctcgtgcgctctcctgttccgaccctgccgcttaccggatacctgtccgcctttctcccttcgggaagcgtggcgctttctcatagctcacgctgtaggtatctcagttcggtgtaggtcgttcgctccaagctgggctgtgtgcacgaaccccccgttcagcccgaccgctgcgccttatccggtaactatcgtcttgagtccaacccggtaagacacgacttatcgccactggcagcagccactggtaacaggattagcagagcgaggtatgtaggcggtgctacagagttcttgaagtggtggcctaactacggctacactagaagaacagtatttggtatctgcgctctgctgaagccagttaccttcggaaaaagagttggtagctcttgatccggcaaacaaaccaccgctggtagcggtggtttttttgtttgcaagcagcagattacgcgcagaaaaaaaggatctcaagaagatcctttgatcttttctacggggtctgacgctcagtggaacgaaaactcacgttaagggattttggtcatgagattatcaaaaaggatcttcacctagatccttttaaattaaaaatgaagttttaaatcaatctaaagtatatatgagtaaacttggtctgacagttagaaaaactcatcgagcatcaaatgaaactgcaatttattcatatcaggattatcaataccatatttttgaaaaagccgtttctgtaatgaaggagaaaactcaccgaggcagttccataggatggcaagatcctggtatcggtctgcgattccgactcgtccaacatcaatacaacctattaatttcccctcgtcaaaaataaggttatcaagtgagaaatcaccatgagtgacgactgaatccggtgagaatggcaaaagtttatgcatttctttccagacttgttcaacaggccagccattacgctcgtcatcaaaatcactcgcatcaaccaaaccgttattcattcgtgattgcgcctgagcgagacgaaatacgcgatcgctgttaaaaggacaattacaaacaggaatcgaatgcaaccggcgcaggaacactgccagcgcatcaacaatattttcacctgaatcaggatattcttctaatacctggaatgctgttttcccagggatcgcagtggtgagtaaccatgcatcatcaggagtacggataaaatgcttgatggtcggaagaggcataaattccgtcagccagtttagtctgaccatctcatctgtaacatcattggcaacgctacctttgccatgtttcagaaacaactctggcgcatcgggcttcccatacaatcgatagattgtcgcacctgattgcccgacattatcgcgagcccatttatacccatataaatcagcatccatgttggaatttaatcgcggcctagagcaagacgtttcccgttgaatatggctcatactcttcctttttcaatattattgaagcatttatcagggttattgtctcatgagcggatacatatttgaatgtatttagaaaaataaacaaataggggttccgcgcacatttccccgaaaagtgccacctgacgtctaagaaaccattattatcatgacattaacctataaaaataggcgtatcacgaggccctttcgtctcgcgcgtttcggtgatgacggtgaaaacctctgacacatgcagctcccggagacggtcacagcttgtctgtaagcggatgccgggagcagacaagcccgtcagggcgcgtcagcgggtgttggcgggtgtcggggctggcttaactatgcggcatcagagcagattgtactgagagtgcaccatatgcggtgtgaaataccgcacagatgcgtaaggagaaaataccgcatcaggcgccattcgccattcaggctgcgcaactgttgggaagggcgatcggtgcgggcctcttcgctattacgccagctggcgaaagggggatgtgctgcaaggcgattaagttgggtaacgccagggttttcccagtcacgacgttgtaaaacgacggccagtgaattgacgcgtattgggatggaac

SEQ ID NO: 10101 - DNA, 143 bp, synthetic construct; identical to SEQ ID NO: 9901
  misc_feature 1..143: note = pSBT101, 5'ITR
  source 1..143: mol_type = other DNA

SEQ ID NO: 10102-10104 - skipped (3 entries)

SEQ ID NO: 10105 - DNA, 366 bp, synthetic construct; identical to SEQ ID NO: 9905
  misc_feature 1..366: note = pSBT101, CMV Enhancer
  source 1..366: mol_type = other DNA

SEQ ID NO: 10106 - skipped

SEQ ID NO: 10107 - DNA, 278 bp, synthetic construct; identical to SEQ ID NO: 10
  misc_feature 1..278: note = pSBT101, CBA Promoter
  source 1..278: mol_type = other DNA

SEQ ID NO: 10108 - DNA, 93 bp, synthetic construct; identical to SEQ ID NO: 11
  misc_feature 1..93: note = pSBT101, beta-actin Exon
  source 1..93: mol_type = other DNA

SEQ ID NO: 10109 - DNA, 155 bp, synthetic construct; identical to SEQ ID NO: 9909
  misc_feature 1..155: note = pSBT101, Chimeric Intron
  source 1..155: mol_type = other DNA

SEQ ID NO: 10110 - DNA, 117 bp, synthetic construct; identical to SEQ ID NO: 9910
  misc_feature 1..117: note = pSBT101, hABCD1 5' UTR
  source 1..117: mol_type = other DNA

SEQ ID NO: 10111 - skipped

SEQ ID NO: 10112 - DNA, 2238 bp, synthetic construct; identical to SEQ ID NO: 204
  misc_feature 1..2238: note = pSBT101, hABCD1
  source 1..2238: mol_type = other DNA

SEQ ID NO: 10113 - DNA, 49 bp, synthetic construct; identical to SEQ ID NO: 9913
  misc_feature 1..49: note = pSBT101, hABCD1 3' UTR
  source 1..49: mol_type = other DNA

SEQ ID NO: 10114 - DNA, 197 bp, synthetic construct; identical to SEQ ID NO: 9914
  misc_feature 1..197: note = pSBT101, SV40 pA
  source 1..197: mol_type = other DNA

SEQ ID NO: 10115 - skipped

SEQ ID NO: 10116 - DNA, 208 bp, synthetic construct; identical to SEQ ID NO: 9916
  misc_feature 1..208: note = pSBT101, bGHpA
  source 1..208: mol_type = other DNA

SEQ ID NO: 10117 - skipped

SEQ ID NO: 10118 - DNA, 143 bp, synthetic construct; identical to SEQ ID NO: 9918
  misc_feature 1..143: note = pSBT101, 3'ITR
  source 1..143: mol_type = other DNA

SEQ ID NO: 10119-10134 - skipped (16 entries)

SEQ ID NO: 10135 - DNA, 434 bp, synthetic construct; identical to SEQ ID NO: 206
  misc_feature 1..434: note = pSBT101, Total polyA
  source 1..434: mol_type = other DNA

SEQ ID NO: 10136-10149 - skipped (14 entries)

SEQ ID NO: 10150 - DNA, 4178 bp, synthetic construct
  misc_feature 1..4178: note = pSBT101, ITR-ITR
  source 1..4178: mol_type = other DNA
ggccactccctctctgcgcgctcgctcgctcactgaggccgcccgggcaaagcccgggcgtcgggcgacctttggtcgcccggcctcagtgagcgagcgagcgcgcagagagggagtggccaactccatcactaggggttcctcagatctgaattcggtacctagttattaatagtaatcaattacggggtcattagttcatagcccatatatggagttccgcgttacataacttacggtaaatggcccgcctggctgaccgcccaacgacccccgcccattgacgtcaataatgacgtatgttcccatagtaacgccaatagggactttccattgacgtcaatgggtggagtatttacggtaaactgcccacttggcagtacatcaagtgtatcatatgccaagtacgccccctattgacgtcaatgacggtaaatggcccgcctggcattatgcccagtacatgaccttatgggactttcctacttggcagtacatctacgtattagtcatcgctattaccatggtcgaggtgagccccacgttctgcttcactctccccatctcccccccctccccacccccaattttgtatttatttattttttaattattttgtgcagcgatgggggcggggggggggggggggcgcgcgccaggcggggcggggcggggcgaggggcggggcggggcgaggcggagaggtgcggcggcagccaatcagagcggcgcgctccgaaagtttccttttatggcgaggcggcggcggcggcggccctataaaaagcgaagcgcgcggcgggcgggagtcgctgcgcgctgccttcgccccgtgccccgctccgccgccgcctcgcgccgcccgccccggctctgactgaccgcgttactcccacaggtgagcgggcgggacggcccttctcctccgggctgtaattagcgcttggtttaatgacggcttgtttcttttctgtggctgcgtgaaagccttgaggggctccgggagctagagcctctgctaaccatgttcatgccttcttctttttcctacagctcctgggcaacgtgctggttattgtgctgtctcatcattttggcaaagaattcctcgaagatccgaaggggttcaagctttccagttgcctagacaacaggcccagggtcagagcaacaatccttccagccacctgcctcaactgctgccccaggcaccagccccagtccctacgcggcagccagcccaggtgacatgccggtgctctccaggccccggccctggcgggggaacacgctgaagcgcacggccgtgctcctggccctcgcggcctatggagcccacaaagtctaccccttggtgcgccagtgcctggccccggccaggggtcttcaggcgcccgccggggagcccacgcaggaggcctccggggtcgcggcggccaaagctggcatgaaccgggtattcctgcagcggctcctgtggctcctgcggctgctgttcccccgggtcctgtgccgggagacggggctgctggccctgcactcggccgccttggtgagccgcaccttcctgtcggtgtatgtggcccgcctggacggaaggctggcccgctgcatcgtccgcaaggacccgcgggcttttggctggcagctgctgcagtggctcctcatcgccctccctgctaccttcgtcaacagtgccatccgttacctggagggccaactggccctgtcgttccgcagccgtctggtggcccacgcctaccgcctctacttctcccagcagacctactaccgggtcagcaacatggacgggcggcttcgcaaccctgaccagtctctgacggaggacgtggtggcctttgcggcctctgtggcccacctctactccaacctgaccaagccactcctggacgtggctgtgacttcctacaccctgcttcgggcggcccgctcccgtggagccggcacagcctggccctcggccatcgccggcctcgtggtgttcctcacggccaacgtgctgcgggccttctcgcccaagttcggggagctggtggcagaggaggcgcggcggaagggggagctgcgctacatgcactcgcgtgtggtggccaactcggaggagatcgccttctatgggggccatgaggtggagctggccctgctacagcgctcctaccaggacctggcctcgcagatcaacctcatccttctggaacgcctgtggtatgttatgctggagcagttcctcatgaagtatgtgtggagcgcctcgggcctgctcatggtggctgtccccatcatcactgccactggctactcagagtcagatgcagaggccgtgaagaaggcagccttggaaaagaaggaggaggagctggtgagcgagcgcacagaagccttcactattgcccgcaacctcctgacagcggctgcagatgccattgagcggatcatgtcgtcgtacaaggaggtgacggagctggctggctacacagcccgggtgcacgagatgttccaggtatttgaagatgttcagcgctgtcacttcaagaggcccagggagctagaggacgctcaggcggggtctgggaccataggccggtctggtgtccgtgtggagggccccctgaagatccgaggccaggtggtggatgtggaacaggggatcatctgcgagaacatccccatcgtcacgccctcaggagaggtggtggtggccagcctcaacatcagggtggaggaaggcatgcatctgctcatcacaggccccaatggctgcggcaagagctccctgttccggatcctgggtgggctctggcccacgtacggtggtgtgctctacaagcccccaccccagcgcatgttctacatcccgcagaggccctacatgtctgtgggctccctgcgtgaccaggtgatctacccggactcagtggaggacatgcaaaggaagggctactcggagcaggacctggaagccatcctggacgtcgtgcacctgcaccacatcctgcagcgggagggaggttgggaggctatgtgtgactggaaggacgtcctgtcgggtggcgagaagcagagaatcggcatggcccgcatgttctaccacaggcccaagtacgccctcctggatgaatgcaccagcgccgtgagcatcgacgtggaaggcaagatcttccaggcggccaaggacgcgggcattgccctgctctccatcacccaccggccctccctgtggaaataccacacacacttgctacagttcgatggggagggcggctggaagttcgagaagctggactcagctgcccgcctgagcctgacggaggagaagcagcggctggagcagcagctggcgggcattcccaagatgcagcggcgcctccaggagctctgccagatcctgggcgaggccgtggccccagcgcatgtgccggcacctagcccgcaaggccctggtggcctccagggtgcctccacctgacacaaccgtccccggcccctgccccgcccccaagctcggatcacatgaattctgcagatatccagcacagtggcggccgctcgagctagcggccgctctagaaagagatccagacatgataagatacattgatgagtttggacaaaccacaactagaatgcagtgaaaaaaatgctttatttgtgaaatttgtgatgctattgctttatttgtaaccattataagctgcaataaacaagttaacaacaacaattgcattcattttatgtttcaggttcagggggaggtgtgggaggttttttagtcgactagagctcgctgatcagcctcgactgtgccttctagttgccagccatctgttgtttgcccctcccccgtgccttccttgaccctggaaggtgccactcccactgtcctttcctaataaaatgaggaaattgcatcgcattgtctgagtaggtgtcattctattctggggggtggggtggggcaggacagcaagggggaggattgggaagacaatagcaggcatgctggggagagatctgaggaacccctagtgatggagttggccactccctctctgcgcgctcgctcgctcactgaggccgggcgaccaaaggtcgcccgacgcccgggctttgcccgggcggcctcagtgagcgagcgagcgcgcagagagggagtggcc

SEQ ID NO: 10151-10159 - skipped (9 entries)

SEQ ID NO: 10160 - DNA, 4180 bp, synthetic construct
  misc_feature 1..4180: note = pSBT101, rAAV vector genome
  source 1..4180: mol_type = other DNA
tggccactccctctctgcgcgctcgctcgctcactgaggccgcccgggcaaagcccgggcgtcgggcgacctttggtcgcccggcctcagtgagcgagcgagcgcgcagagagggagtggccaactccatcactaggggttcctcagatctgaattcggtacctagttattaatagtaatcaattacggggtcattagttcatagcccatatatggagttccgcgttacataacttacggtaaatggcccgcctggctgaccgcccaacgacccccgcccattgacgtcaataatgacgtatgttcccatagtaacgccaatagggactttccattgacgtcaatgggtggagtatttacggtaaactgcccacttggcagtacatcaagtgtatcatatgccaagtacgccccctattgacgtcaatgacggtaaatggcccgcctggcattatgcccagtacatgaccttatgggactttcctacttggcagtacatctacgtattagtcatcgctattaccatggtcgaggtgagccccacgttctgcttcactctccccatctcccccccctccccacccccaattttgtatttatttattttttaattattttgtgcagcgatgggggcggggggggggggggggcgcgcgccaggcggggcggggcggggcgaggggcggggcggggcgaggcggagaggtgcggcggcagccaatcagagcggcgcgctccgaaagtttccttttatggcgaggcggcggcggcggcggccctataaaaagcgaagcgcgcggcgggcgggagtcgctgcgcgctgccttcgccccgtgccccgctccgccgccgcctcgcgccgcccgccccggctctgactgaccgcgttactcccacaggtgagcgggcgggacggcccttctcctccgggctgtaattagcgcttggtttaatgacggcttgtttcttttctgtggctgcgtgaaagccttgaggggctccgggagctagagcctctgctaaccatgttcatgccttcttctttttcctacagctcctgggcaacgtgctggttattgtgctgtctcatcattttggcaaagaattcctcgaagatccgaaggggttcaagctttccagttgcctagacaacaggcccagggtcagagcaacaatccttccagccacctgcctcaactgctgccccaggcaccagccccagtccctacgcggcagccagcccaggtgacatgccggtgctctccaggccccggccctggcgggggaacacgctgaagcgcacggccgtgctcctggccctcgcggcctatggagcccacaaagtctaccccttggtgcgccagtgcctggccccggccaggggtcttcaggcgcccgccggggagcccacgcaggaggcctccggggtcgcggcggccaaagctggcatgaaccgggtattcctgcagcggctcctgtggctcctgcggctgctgttcccccgggtcctgtgccgggagacggggctgctggccctgcactcggccgccttggtgagccgcaccttcctgtcggtgtatgtggcccgcctggacggaaggctggcccgctgcatcgtccgcaaggacccgcgggcttttggctggcagctgctgcagtggctcctcatcgccctccctgctaccttcgtcaacagtgccatccgttacctggagggccaactggccctgtcgttccgcagccgtctggtggcccacgcctaccgcctctacttctcccagcagacctactaccgggtcagcaacatggacgggcggcttcgcaaccctgaccagtctctgacggaggacgtggtggcctttgcggcctctgtggcccacctctactccaacctgaccaagccactcctggacgtggctgtgacttcctacaccctgcttcgggcggcccgctcccgtggagccggcacagcctggccctcggccatcgccggcctcgtggtgttcctcacggccaacgtgctgcgggccttctcgcccaagttcggggagctggtggcagaggaggcgcggcggaagggggagctgcgctacatgcactcgcgtgtggtggccaactcggaggagatcgccttctatgggggccatgaggtggagctggccctgctacagcgctcctaccaggacctggcctcgcagatcaacctcatccttctggaacgcctgtggtatgttatgctggagcagttcctcatgaagtatgtgtggagcgcctcgggcctgctcatggtggctgtccccatcatcactgccactggctactcagagtcagatgcagaggccgtgaagaaggcagccttggaaaagaaggaggaggagctggtgagcgagcgcacagaagccttcactattgcccgcaacctcctgacagcggctgcagatgccattgagcggatcatgtcgtcgtacaaggaggtgacggagctggctggctacacagcccgggtgcacgagatgttccaggtatttgaagatgttcagcgctgtcacttcaagaggcccagggagctagaggacgctcaggcggggtctgggaccataggccggtctggtgtccgtgtggagggccccctgaagatccgaggccaggtggtggatgtggaacaggggatcatctgcgagaacatccccatcgtcacgccctcaggagaggtggtggtggccagcctcaacatcagggtggaggaaggcatgcatctgctcatcacaggccccaatggctgcggcaagagctccctgttccggatcctgggtgggctctggcccacgtacggtggtgtgctctacaagcccccaccccagcgcatgttctacatcccgcagaggccctacatgtctgtgggctccctgcgtgaccaggtgatctacccggactcagtggaggacatgcaaaggaagggctactcggagcaggacctggaagccatcctggacgtcgtgcacctgcaccacatcctgcagcgggagggaggttgggaggctatgtgtgactggaaggacgtcctgtcgggtggcgagaagcagagaatcggcatggcccgcatgttctaccacaggcccaagtacgccctcctggatgaatgcaccagcgccgtgagcatcgacgtggaaggcaagatcttccaggcggccaaggacgcgggcattgccctgctctccatcacccaccggccctccctgtggaaataccacacacacttgctacagttcgatggggagggcggctggaagttcgagaagctggactcagctgcccgcctgagcctgacggaggagaagcagcggctggagcagcagctggcgggcattcccaagatgcagcggcgcctccaggagctctgccagatcctgggcgaggccgtggccccagcgcatgtgccggcacctagcccgcaaggccctggtggcctccagggtgcctccacctgacacaaccgtccccggcccctgccccgcccccaagctcggatcacatgaattctgcagatatccagcacagtggcggccgctcgagctagcggccgctctagaaagagatccagacatgataagatacattgatgagtttggacaaaccacaactagaatgcagtgaaaaaaatgctttatttgtgaaatttgtgatgctattgctttatttgtaaccattataagctgcaataaacaagttaacaacaacaattgcattcattttatgtttcaggttcagggggaggtgtgggaggttttttagtcgactagagctcgctgatcagcctcgactgtgccttctagttgccagccatctgttgtttgcccctcccccgtgccttccttgaccctggaaggtgccactcccactgtcctttcctaataaaatgaggaaattgcatcgcattgtctgagtaggtgtcattctattctggggggtggggtggggcaggacagcaagggggaggattgggaagacaatagcaggcatgctggggagagatctgaggaacccctagtgatggagttggccactccctctctgcgcgctcgctcgctcactgaggccgggcgaccaaaggtcgcccgacgcccgggctttgcccgggcggcctcagtgagcgagcgagcgcgcagagagggagtggcca

SEQ ID NO: 10161-10184 - skipped (24 entries)

SEQ ID NO: 10185 - DNA, 54 bp, synthetic construct; identical to SEQ ID NO: 9985
  misc_feature 1..54: note = pSBT101, Rabbit beta-globin exon
  source 1..54: mol_type = other DNA

SEQ ID NO: 10186-10199 - skipped (14 entries)

SEQ ID NO: 10200 - DNA, 6840 bp, synthetic construct
  misc_feature 1..6840: note = AAV-CBA-ABCD1 [no WPRE], full plasmid
  source 1..6840: mol_type = other DNA
ttggccactccctctctgcgcgctcgctcgctcactgaggccgggcgaccaaaggtcgcccgacgcccgggctttgcccgggcggcctcagtgagcgagcgagcgcgcagagagggagtggccaactccatcactaggggttcctagatctgaattcggtaccctagttattaatagtaatcaattacggggtcattagttcatagcccatatatggagttccgcgttacataacttacggtaaatggcccgcctggctgaccgcccaacgacccccgcccattgacgtcaataatgacgtatgttcccatagtaacgccaatagggactttccattgacgtcaatgggtggactatttacggtaaactgcccacttggcagtacatcaagtgtatcatatgccaagtacgccccctattgacgtcaatgacggtaaatggcccgcctggcattatgcccagtacatgaccttatgggactttcctacttggcagtacatctacgtattagtcatcgctattaccatggtcgaggtgagccccacgttctgcttcactctccccatctcccccccctccccacccccaattttgtatttatttattttttaattattttgtgcagcgatgggggcggggggggggggggggcgcgcgccaggcggggcggggcggggcgaggggcggggcggggcgaggcggagaggtgcggcggcagccaatcagagcggcgcgctccgaaagtttccttttatggcgaggcggcggcggcggcggccctataaaaagcgaagcgcgcggcgggcgggagtcgctgcgacgctgccttcgccccgtgccccgctccgccgccgcctcgcgccgcccgccccggctctgactgaccgcgttactcccacaggtgagcgggcgggacggcccttctcctccgggctgtaattagcgcttggtttaatgacggcttgtttcttttctgtggctgcgtgaaagccttgaggggctccgggagctagagcctctgctaaccatgttcatgccttcttctttttcctacagctcctgggcaacgtgctggttattgtgctgtctcatcattttggcaaagaattcctcgaagatccgaaggggttcaatgccggtgctctccaggccccggccctggcgggggaacacgctgaagcgcacggccgtgctcctggccctcgcggcctatggagcccacaaagtctaccccttggtgcgccagtgcctggccccggccaggggtcttcaggcgcccgccggggagcccacgcaggaggcctccggggtcgcggcggccaaagctggcatgaaccgggtattcctgcagcggctcctgtggctcctgcggctgctgttcccccgggtcctgtgccgggagacggggctgctggccctgcactcggccgccttggtgagccgcaccttcctgtcggtgtatgtggcccgcctggacggaaggctggcccgctgcatcgtccgcaaggacccgcgggcttttggctggcagctgctgcagtggctcctcatcgccctccctgctaccttcgtcaacagtgccatccgttacctggagggccaactggccctgtcgttccgcagccgtctggtggcccacgcctaccgcctctacttctcccagcagacctactaccgggtcagcaacatggacgggcggcttcgcaaccctgaccagtctctgacggaggacgtggtggcctttgcggcctctgtggcccacctctactccaacctgaccaagccactcctggacgtggctgtgacttcctacaccctgcttcgggcggcccgctcccgtggagccggcacagcctggccctcggccatcgccggcctcgtggtgttcctcacggccaacgtgctgcgggccttctcgcccaagttcggggagctggtggcagaggaggcgcggcggaagggggagctgcgctacatgcactcgcgtgtggtggccaactcggaggagatcgccttctatgggggccatgaggtggagctggccctgctacagcgctcctaccaggacctggcctcgcagatcaacctcatccttctggaacgcctgtggtatgttatgctggagcagttcctcatgaagtatgtgtggagcgcctcgggcctgctcatggtggctgtccccatcatcactgccactggctactcagagtcagatgcagaggccgtgaagaaggcagccttggaaaagaaggaggaggagctggtgagcgagcgcacagaagccttcactattgcccgcaacctcctgacagcggctgcagatgccattgagcggatcatgtcgtcgtacaaggaggtgacggagctggctggctacacagcccgggtgcacgagatgttccaggtatttgaagatgttcagcgctgtcacttcaagaggcccagggagctagaggacgctcaggcggggtctgggaccataggccggtctggtgtccgtgtggagggccccctgaagatccgaggccaggtggtggatgtggaacaggggatcatctgcgagaacatccccatcgtcacgccctcaggagaggtggtggtggccagcctcaacatcagggtggaggaaggcatgcatctgctcatcacaggccccaatggctgcggcaagagctccctgttccggatcctgggtgggctctggcccacgtacggtggtgtgctctacaagcccccaccccagcgcatgttctacatcccgcagaggccctacatgtctgtgggctccctgcgtgaccaggtgatctacccggactcagtggaggacatgcaaaggaagggctactcggagcaggacctggaagccatcctggacgtcgtgcacctgcaccacatcctgcagcgggagggaggttgggaggctatgtgtgactggaaggacgtcctgtcgggtggcgagaagcagagaatcggcatggcccgcatgttctaccacaggcccaagtacgccctcctggatgaatgcaccagcgccgtgagcatcgacgtggaaggcaagatcttccaggcggccaaggacgcgggcattgccctgctctccatcacccaccggccctccctgtggaaataccacacacacttgctacagttcgatggggagggcggctggaagttcgagaagctggactcagctgcccgcctgagcctgacggaggagaagcagcggctggagcagcagctggcgggcattcccaagatgcagcggcgcctccaggagctctgccagatcctgggcgaggccgtggccccagcgcatgtgccggcacctagcccgcaaggccctggtggcctccagggtgcctccacctgactcgagctagcggccgctctagaaagagatccagacatgataagatacattgatgagtttggacaaaccacaactagaatgcagtgaaaaaaatgctttatttgtgaaatttgtgatgctattgctttatttgtaaccattataagctgcaataaacaagttaacaacaacaattgcattcattttatgtttcaggttcagggggaggtgtgggaggttttttagtcgactagagctcgctgatcagcctcgactgtgccttctagttgccagccatctgttgtttgcccctcccccgtgccttccttgaccctggaaggtgccactcccactgtcctttcctaataaaatgaggaaattgcatcgcattgtctgagtaggtgtcattctattctggggggtggggtggggcaggacagcaagggggaggattgggaagacaatagcaggcatgctggggagagatctaggaacccctagtgatggagttggccactccctctctgcgcgctcgctcgctcactgaggccgcccgggcaaagcccgggcgtcgggcgacctttggtcgcccggcctcagtgagcgagcgagcgcgcagagagggagtggccacccccccccccccctgcagcctgcattaatgaatcggccaacgcgcggggagaggcggtttgcgtattgggcgctcttccgcttcctcgctcactgactcgctgcgctcggtcgttcggctgcggcgagcggtatcagctcactcaaaggcggtaatacggttatccacagaatcaggggataacgcaggaaagaacatgtgagcaaaaggccagcaaaaggccaggaaccgtaaaaaggccgcgttgctggcgtttttccataggctccgcccccctgacgagcatcacaaaaatcgacgctcaagtcagaggtggcgaaacccgacaggactataaagataccaggcgtttccccctggaagctccctcgtgcgctctcctgttccgaccctgccgcttaccggatacctgtccgcctttctcccttcgggaagcgtggcgctttctcatagctcacgctgtaggtatctcagttcggtgtaggtcgttcgctccaagctgggctgtgtgcacgaaccccccgttcagcccgaccgctgcgccttatccggtaactatcgtcttgagtccaacccggtaagacacgacttatcgccactggcagcagccactggtaacaggattagcagagcgaggtatgtaggcggtgctacagagttcttgaagtggtggcctaactacggctacactagaagaacagtatttggtatctgcgctctgctgaagccagttaccttcggaaaaagagttggtagctcttgatccggcaaacaaaccaccgctggtagcggtggtttttttgtttgcaagcagcagattacgcgcagaaaaaaaggatctcaagaagatcctttgatcttttctacggggtctgacgctcagtggaacgaaaactcacgttaagggattttggtcatgagattatcaaaaaggatcttcacctagatccttttaaattaaaaatgaagttttaaatcaatctaaagtatatatgagtaaacttggtctgacagttaccaatgcttaatcagtgaggcacctatctcagcgatctgtctatttcgttcatccatagttgcctgactccccgtcgtgtagataactacgatacgggagggcttaccatctggccccagtgctgcaatgataccgcgagacccacgctcaccggctccagatttatcagcaataaaccagccagccggaagggccgagcgcagaagtggtcctgcaactttatccgcctccatccagtctattaattgttgccgggaagctagagtaagtagttcgccagttaatagtttgcgcaacgttgttgccattgctacaggcatcgtggtgtcacgctcgtcgtttggtatggcttcattcagctccggttcccaacgatcaaggcgagttacatgatcccccatgttgtgcaaaaaagcggttagctccttcggtcctccgatcgttgtcagaagtaagttggccgcagtgttatcactcatggttatggcagcactgcataattctcttactgtcatgccatccgtaagatgcttttctgtgactggtgagtactcaaccaagtcattctgagaatagtgtatgcggcgaccgagttgctcttgcccggcgtcaatacgggataataccgcgccacatagcagaactttaaaagtgctcatcattggaaaacgttcttcggggcgaaaactctcaaggatcttaccgctgttgagatccagttcgatgtaacccactcgtgcacccaactgatcttcagcatcttttactttcaccagcgtttctgggtgagcaaaaacaggaaggcaaaatgccgcaaaaaagggaataagggcgacacggaaatgttgaatactcatactcttcctttttcaatattattgaagcatttatcagggttattgtctcatgagcggatacatatttgaatgtatttagaaaaataaacaaataggggttccgcgcacatttccccgaaaagtgccacctgacgtctaagaaaccattattatcatgacattaacctataaaaataggcgtatcacgaggccctttcgtctcgcgcgtttcggtgatgacggtgaaaacctctgacacatgcagctcccggagacggtcacagcttgtctgtaagcggatgccgggagcagacaagcccgtcagggcgcgtcagcgggtgttggcgggtgtcggggctggcttaactatgcggcatcagagcagattgtactgagagtgcaccatatgcggtgtgaaataccgcacagatgcgtaaggagaaaataccgcatcaggaaattgtaagcgttaatattttgttaaaattcgcgttaaatttttgttaaatcagctcattttttaaccaataggccgaaatcggcaaaatcccttataaatcaaaagaatagaccgagatagggttgagtgttgttccagtttggaacaagagtccactattaaagaacgtggactccaacgtcaaagggcgaaaaaccgtctatcagggcgatggcccactacgtgaaccatcaccctaatcaagttttttggggtcgaggtgccgtaaagcactaaatcggaaccctaaagggagcccccgatttagagcttgacggggaaagccggcgaacgtggcgagaaaggaagggaagaaagcgaaaggagcgggcgctagggcgctggcaagtgtagcggtcacgctgcgcgtaaccaccacacccgccgcgcttaatgcgccgctacagggcgcgtccattcgccattcaggctgcgcaactgttgggaagggcgatcggtgcgggcctcttcgctattacgccaggctgcagggggggggggggg

SEQ ID NO: 10201 - DNA, 145 bp, synthetic construct; identical to SEQ ID NO: 601
  misc_feature 1..145: note = AAV-CBA-ABCD1 [no WPRE], 5'ITR
  source 1..145: mol_type = other DNA

SEQ ID NO: 10202-10204 - skipped (3 entries)

SEQ ID NO: 10205 - DNA, 366 bp, synthetic construct
  misc_feature 1..366: note = AAV-CBA-ABCD1 [no WPRE], CMV Enhancer
  source 1..366: mol_type = other DNA
ctagttattaatagtaatcaattacggggtcattagttcatagcccatatatggagttccgcgttacataacttacggtaaatggcccgcctggctgaccgcccaacgacccccgcccattgacgtcaataatgacgtatgttcccatagtaacgccaatagggactttccattgacgtcaatgggtggactatttacggtaaactgcccacttggcagtacatcaagtgtatcatatgccaagtacgccccctattgacgtcaatgacggtaaatggcccgcctggcattatgcccagtacatgaccttatgggactttcctacttggcagtacatctacgtattagtcatcgctattaccatgg

SEQ ID NO: 10206 - skipped

SEQ ID NO: 10207 - DNA, 278 bp, synthetic construct; identical to SEQ ID NO: 10
  misc_feature 1..278: note = AAV-CBA-ABCD1 [no WPRE], CBA Promoter
  source 1..278: mol_type = other DNA

SEQ ID NO: 10208 - DNA, 94 bp, synthetic construct
  misc_feature 1..94: note = AAV-CBA-ABCD1 [no WPRE], beta-actin Exon
  source 1..94: mol_type = other DNA
ggagtcgctgcgacgctgccttcgccccgtgccccgctccgccgccgcctcgcgccgcccgccccggctctgactgaccgcgttactcccacag

SEQ ID NO: 10209 - DNA, 155 bp, synthetic construct; identical to SEQ ID NO: 9909
  misc_feature 1..155: note = AAV-CBA-ABCD1 [no WPRE], Chimeric Intron
  source 1..155: mol_type = other DNA

SEQ ID NO: 10210-10211 - skipped (2 entries)

SEQ ID NO: 10212 - DNA, 2238 bp, synthetic construct; identical to SEQ ID NO: 204
  misc_feature 1..2238: note = AAV-CBA-ABCD1 [no WPRE], hABCD1
  source 1..2238: mol_type = other DNA

SEQ ID NO: 10213 - skipped

SEQ ID NO: 10214 - DNA, 197 bp, synthetic construct; identical to SEQ ID NO: 9914
  misc_feature 1..197: note = AAV-CBA-ABCD1 [no WPRE], SV40 pA
  source 1..197: mol_type = other DNA

SEQ ID NO: 10215 - skipped

SEQ ID NO: 10216 - DNA, 208 bp, synthetic construct; identical to SEQ ID NO: 9916
  misc_feature 1..208: note = AAV-CBA-ABCD1 [no WPRE], bGHpA
  source 1..208: mol_type = other DNA

SEQ ID NO: 10217 - skipped

SEQ ID NO: 10218 - DNA, 144 bp, synthetic construct; identical to SEQ ID NO: 612
  misc_feature 1..144: note = AAV-CBA-ABCD1 [no WPRE], 3'ITR
  source 1..144: mol_type = other DNA

SEQ ID NO: 10219-10234 - skipped (16 entries)

SEQ ID NO: 10235 - DNA, 434 bp, synthetic construct; identical to SEQ ID NO: 206
  misc_feature 1..434: note = AAV-CBA-ABCD1 [no WPRE], Total polyA
  source 1..434: mol_type = other DNA

SEQ ID NO: 10236-10249 - skipped (14 entries)

SEQ ID NO: 10250 - DNA, 3982 bp, synthetic construct; identical to SEQ ID NO: 400
  misc_feature 1..3982: note = AAV-CBA-ABCD1 [no WPRE], ITR-ITR
  source 1..3982: mol_type = other DNA

SEQ ID NO: 10251-10259 - skipped (9 entries)

SEQ ID NO: 10260 - DNA, 3981 bp, synthetic construct
  misc_feature 1..3981: note = AAV-CBA-ABCD1 [no WPRE], rAAV vector genome
  source 1..3981: mol_type = other DNA
tggccactccctctctgcgcgctcgctcgctcactgaggccgggcgaccaaaggtcgcccgacgcccgggctttgcccgggcggcctcagtgagcgagcgagcgcgcagagagggagtggccaactccatcactaggggttcctagatctgaattcggtaccctagttattaatagtaatcaattacggggtcattagttcatagcccatatatggagttccgcgttacataacttacggtaaatggcccgcctggctgaccgcccaacgacccccgcccattgacgtcaataatgacgtatgttcccatagtaacgccaatagggactttccattgacgtcaatgggtggactatttacggtaaactgcccacttggcagtacatcaagtgtatcatatgccaagtacgccccctattgacgtcaatgacggtaaatggcccgcctggcattatgcccagtacatgaccttatgggactttcctacttggcagtacatctacgtattagtcatcgctattaccatggtcgaggtgagccccacgttctgcttcactctccccatctcccccccctccccacccccaattttgtatttatttattttttaattattttgtgcagcgatgggggcggggggggggggggggcgcgcgccaggcggggcggggcggggcgaggggcggggcggggcgaggcggagaggtgcggcggcagccaatcagagcggcgcgctccgaaagtttccttttatggcgaggcggcggcggcggcggccctataaaaagcgaagcgcgcggcgggcgggagtcgctgcgacgctgccttcgccccgtgccccgctccgccgccgcctcgcgccgcccgccccggctctgactgaccgcgttactcccacaggtgagcgggcgggacggcccttctcctccgggctgtaattagcgcttggtttaatgacggcttgtttcttttctgtggctgcgtgaaagccttgaggggctccgggagctagagcctctgctaaccatgttcatgccttcttctttttcctacagctcctgggcaacgtgctggttattgtgctgtctcatcattttggcaaagaattcctcgaagatccgaaggggttcaatgccggtgctctccaggccccggccctggcgggggaacacgctgaagcgcacggccgtgctcctggccctcgcggcctatggagcccacaaagtctaccccttggtgcgccagtgcctggccccggccaggggtcttcaggcgcccgccggggagcccacgcaggaggcctccggggtcgcggcggccaaagctggcatgaaccgggtattcctgcagcggctcctgtggctcctgcggctgctgttcccccgggtcctgtgccgggagacggggctgctggccctgcactcggccgccttggtgagccgcaccttcctgtcggtgtatgtggcccgcctggacggaaggctggcccgctgcatcgtccgcaaggacccgcgggcttttggctggcagctgctgcagtggctcctcatcgccctccctgctaccttcgtcaacagtgccatccgttacctggagggccaactggccctgtcgttccgcagccgtctggtggcccacgcctaccgcctctacttctcccagcagacctactaccgggtcagcaacatggacgggcggcttcgcaaccctgaccagtctctgacggaggacgtggtggcctttgcggcctctgtggcccacctctactccaacctgaccaagccactcctggacgtggctgtgacttcctacaccctgcttcgggcggcccgctcccgtggagccggcacagcctggccctcggccatcgccggcctcgtggtgttcctcacggccaacgtgctgcgggccttctcgcccaagttcggggagctggtggcagaggaggcgcggcggaagggggagctgcgctacatgcactcgcgtgtggtggccaactcggaggagatcgccttctatgggggccatgaggtggagctggccctgctacagcgctcctaccaggacctggcctcgcagatcaacctcatccttctggaacgcctgtggtatgttatgctggagcagttcctcatgaagtatgtgtggagcgcctcgggcctgctcatggtggctgtccccatcatcactgccactggctactcagagtcagatgcagaggccgtgaagaaggcagccttggaaaagaaggaggaggagctggtgagcgagcgcacagaagccttcactattgcccgcaacctcctgacagcggctgcagatgccattgagcggatcatgtcgtcgtacaaggaggtgacggagctggctggctacacagcccgggtgcacgagatgttccaggtatttgaagatgttcagcgctgtcacttcaagaggcccagggagctagaggacgctcaggcggggtctgggaccataggccggtctggtgtccgtgtggagggccccctgaagatccgaggccaggtggtggatgtggaacaggggatcatctgcgagaacatccccatcgtcacgccctcaggagaggtggtggtggccagcctcaacatcagggtggaggaaggcatgcatctgctcatcacaggccccaatggctgcggcaagagctccctgttccggatcctgggtgggctctggcccacgtacggtggtgtgctctacaagcccccaccccagcgcatgttctacatcccgcagaggccctacatgtctgtgggctccctgcgtgaccaggtgatctacccggactcagtggaggacatgcaaaggaagggctactcggagcaggacctggaagccatcctggacgtcgtgcacctgcaccacatcctgcagcgggagggaggttgggaggctatgtgtgactggaaggacgtcctgtcgggtggcgagaagcagagaatcggcatggcccgcatgttctaccacaggcccaagtacgccctcctggatgaatgcaccagcgccgtgagcatcgacgtggaaggcaagatcttccaggcggccaaggacgcgggcattgccctgctctccatcacccaccggccctccctgtggaaataccacacacacttgctacagttcgatggggagggcggctggaagttcgagaagctggactcagctgcccgcctgagcctgacggaggagaagcagcggctggagcagcagctggcgggcattcccaagatgcagcggcgcctccaggagctctgccagatcctgggcgaggccgtggccccagcgcatgtgccggcacctagcccgcaaggccctggtggcctccagggtgcctccacctgactcgagctagcggccgctctagaaagagatccagacatgataagatacattgatgagtttggacaaaccacaactagaatgcagtgaaaaaaatgctttatttgtgaaatttgtgatgctattgctttatttgtaaccattataagctgcaataaacaagttaacaacaacaattgcattcattttatgtttcaggttcagggggaggtgtgggaggttttttagtcgactagagctcgctgatcagcctcgactgtgccttctagttgccagccatctgttgtttgcccctcccccgtgccttccttgaccctggaaggtgccactcccactgtcctttcctaataaaatgaggaaattgcatcgcattgtctgagtaggtgtcattctattctggggggtggggtggggcaggacagcaagggggaggattgggaagacaatagcaggcatgctggggagagatctaggaacccctagtgatggagttggccactccctctctgcgcgctcgctcgctcactgaggccgcccgggcaaagcccgggcgtcgggcgacctttggtcgcccggcctcagtgagcgagcgagcgcgcagagagggagtggcca

SEQ ID NO: 10261-10284 - skipped (24 entries)

SEQ ID NO: 10285 - DNA, 54 bp, synthetic construct; identical to SEQ ID NO: 9985
  misc_feature 1..54: note = AAV-CBA-ABCD1 [no WPRE], Rabbit beta-globin exon
  source 1..54: mol_type = other DNA

SEQ ID NO: 10286-10499 - skipped (214 entries)

SEQ ID NO: 10500 - DNA, 6124 bp, synthetic construct
  misc_feature 1..6124: note = pOB1005, full plasmid
  source 1..6124: mol_type = other DNA
ctgcgcgctcgctcgctcactgaggccgcccgggcaaagcccgggcgtcgggcgacctttggtcgcccggcctcagtgagcgagcgagcgcgcagagagggagtggccaactccatcactaggggttcctgcggccgcaaccgtctagttattaatagtaatcaattacggggtcattagttcatagcccatatatggagttccgcgttacataacttacggtaaatggcccgcctggctgaccgcccaacgacccccgcccattgacgtcaataatgacgtatgttcccatagtaacgccaatagggactttccattgacgtcaatgggtggagtatttacggtaaactgcccacttggcagtacatcaagtgtatcatatgccaagtacgccccctattgacgtcaatgacggtaaatggcccgcctggcattatgcccagtacatgaccttatgggactttcctacttggcagtacatctacgtattagtcatcgctattaccatggtcgaggtgagccccacgttctgcttcactctccccatctcccccccctccccacccccaattttgtatttatttattttttaattattttgtgcagcgatgggggcggggggggggggggggcgcgcgccaggcggggcggggcggggcgaggggcggggcggggcgaggcggagaggtgcggcggcagccaatcagagcggcgcgctccgaaagtttccttttatggcgaggcggcggcggcggcggccctataaaaagcgaagcgcgcggcgggcgggagtcgctgcgcgctgccttcgccccgtgccccgctccgccgccgcctcgcgccgcccgccccggctctgactgaccgcgttactcccacaggtgagcgggcgggacggcccttctcctccgggctgtaattagcgcttggtttaatgacggcttgtttcttttctgtggctgcgtgaaagccttgaggggctccgggagctagagcctctgctaaccatgttcatgccttcttctttttcctacagctcctgggcaacgtgctggttattgtgctgtctcatcattttggcaaagaattcctcgaagatccgaaggggttcaagctcgcgtattgggatagcttccaccatgccggtgctctctaggccccggccctggcgggggaacacgctgaagcgcacggccgtgctcctggccctcgcggcctatggagcccacaaagtctaccccttggtgcgccagtgcctggccccggctaggggtcttcaggcgcccgccggggagcccacgcaggaggcctccggggtcgcggcggccaaagctggcatgaaccgggtattcctgcagcggctcctctggctcctgcggctgctgttcccccgggtcctctgccgggagacggggctgctggccctgcactcggccgccttggtgagccgcaccttcctgtcggtgtacgtggcccgcctggacggaaggctggcccgctgcatcgtccgcaaggacccgcgggcttttggctggcagctgctgcagtggctcctcatcgccctccctgctaccttcgtcaacagtgccatccgttacctggagggccaactggccctgtcgttccgcagccgtctggtggcccacgcctaccgcctctacttctcccagcagacctactaccgggtcagcaacatggacgggcggcttcgcaaccctgaccagtctctgacggaggacgtggtggcctttgcggcctctgtggcccacctctactccaacctgaccaagccactcctggacgtggctgtgacttcctacaccctgcttcgggcggcccgctcccgcggagccggcacagcctggccctcggccatcgccggcctcgtggtgttcctcacggccaacgtgctgcgggccttctcgcccaagttcggggagctggtggcagaggaggcgcggcggaagggggagctgcgctacatgcactcgcgtgtggtggccaactcggaggagatcgccttctatgggggccatgaggtggagctggccctgctacagcgctcctaccaggacctggcctcgcagatcaacctcatccttctggaacgcctctggtatgttatgctggagcagttcctcatgaagtatgtgtggagcgcctcgggcctgctcatggtggctgtccccatcatcactgccactggctactcagagtcagatgcagaggccgtgaagaaggcagccttggaaaagaaggaggaggagctggtgagcgagcgcacagaagccttcactattgcccgcaacctcctgacagcggctgcagatgccattgagcggatcatgtcgtcgtacaaggaggtgacggagctggctggctacacagcccgggtgcacgagatgttccaggtatttgaagatgttcagcgctgtcacttcaagaggcccagggagctagaggacgctcaggcggggtctgggaccataggccggtctggtgtccgtgtggagggccccctgaagatccgaggccaggtggtggacgtggaacaggggatcatctgcgagaacatccccatcgtcacgccctcaggagaggtggtggtggccagcctcaacatcagggtggaggaaggcatgcatctgctcatcacaggccccaatggctgcggcaagagctccctgttccggatcctgggtgggctctggcccacgtacggtggtgtgctctacaagcccccaccccagcgcatgttctacatcccgcagaggccctacatgtctgtgggctccctgcgtgaccaggtgatctacccggactcagtggaggacatgcaaaggaagggctactcggagcaggacctggaagccatcctggacgtcgtgcacctgcaccacatcctgcagcgggagggaggttgggaggctatgtgtgactggaaggacgtcctgtcgggtggcgagaagcagagaatcggcatggcccgcatgttctaccacaggcccaagtacgccctcctggatgaatgcaccagcgccgttagcatcgacgtggaaggcaagatcttccaggcggccaaggacgcgggcattgccctgctctccatcacccaccggccctccctgtggaaataccacacacacttgctacagttcgatggggagggcggctggaagttcgagaagctggactcagctgcccgcctgagcctgacggaggagaagcagcggctggagcagcagctggcgggcattcccaagatgcagcggcgcctccaggagctctgccagatcctgggcgaggccgtggccccagcgcatgtgccggcacctagcccgcaaggccctggtggcctccagggtgcctccacctgataactcgagctagcggccgctctagaaagagatccagacatgataagatacattgatgagtttggacaaaccacaactagaatgcagtgaaaaaaatgctttatttgtgaaatttgtgatgctattgctttatttgtaaccattataagctgcaataaacaagttgtgcggaccgagcggccgcaggaacccctagtgatggagttggccactccctctctgcgcgctcgctcgctcactgaggccgggcgaccaaaggtcgcccgacgcccgggctttgcccgggcggcctcagtgagcgagcgagcgcgcagctgcctgcaggggcgcctgatgcggtattttctccttacgcatctgtgcggtatttcacaccgcatacgtcaaagcaaccatagtacgcgccctgtagcggcgcattaagcgcggcgggtgtggtggttacgcgcagcgtgaccgctacacttgccagcgccttagcgcccgctcctttcgctttcttcccttcctttctcgccacgttcgccggctttccccgtcaagctctaaatcgggggctccctttagggttccgatttagtgctttacggcacctcgaccccaaaaaacttgatttgggtgatggttcacgtagtgggccatcgccctgatagacggtttttcgccctttgacgttggagtccacgttctttaatagtggactcttgttccaaactggaacaacactcaactctatctcgggctattcttttgatttataagggattttgccgatttcggtctattggttaaaaaatgagctgatttaacaaaaatttaacgcgaattttaacaaaatattaacgtttacaattttatggtgcactctcagtacaatctgctctgatgccgcatagttaagccagccccgacacccgccaacacccgctgacgcgccctgacgggcttgtctgctcccggcatccgcttacagacaagctgtgaccgtctccgggagctgcatgtgtcagaggttttcaccgtcatcaccgaaacgcgcgagacgaaagggcctcgtgatacgcctatttttataggttaatgtcatgacgcggaacccctatttgtttatttttctaaatacattcaaatatgtatccgctcatgagacaataaccctgataaatgcttcaataatattgaaaaaggaagagtatgagccatattcaacgggaaacgtcttgctctaggccgcgattaaattccaacatggatgctgatttatatgggtataaatgggctcgcgataatgtcgggcaatcaggtgcgacaatctatcgattgtatgggaagcccgatgcgccagagttgtttctgaaacatggcaaaggtagcgttgccaatgatgttacagatgagatggtcagactaaactggctgacggaatttatgcctcttccgaccatcaagcattttatccgtactcctgatgatgcatggttactcaccactgcgatccctgggaaaacagcattccaggtattagaagaatatcctgattcaggtgaaaatattgttgatgcgctggcagtgttcctgcgccggttgcattcgattcctgtttgtaattgtccttttaacagcgatcgcgtatttcgtctcgctcaggcgcaatcacgaatgaataacggtttggttgatgcgagtgattttgatgacgagcgtaatggctggcctgttgaacaagtctggaaagaaatgcataaacttttgccattctcaccggattcagtcgtcactcatggtgatttctcacttgataaccttatttttgacgaggggaaattaataggttgtattgatgttggacgagtcggaatcgcagaccgataccaggatcttgccatcctatggaactgcctcggtgagttttctccttcattacagaaacggctttttcaaaaatatggtattgataatcctgatatgaataaattgcagtttcatttgatgctcgatgagtttttctaatcatgaccaaaatcccttaacgtgagttttcgttccactgagcgtcagaccccgtagaaaagatcaaaggatcttcttgagatcctttttttctgcgcgtaatctgctgcttgcaaacaaaaaaaccaccgctaccagcggtggtttgtttgccggatcaagagctaccaactctttttccgaaggtaactggcttcagcagagcgcagataccaaatactgttcttctagtgtagccgtagttaggccaccacttcaagaactctgtagcaccgcctacatacctcgctctgctaatcctgttaccagtggctgctgccagtggcgataagtcgtgtcttaccgggttggactcaagacgatagttaccggataaggcgcagcggtcgggctgaacggggggttcgtgcacacagcccagcttggagcgaacgacctacaccgaactgagatacctacagcgtgagctatgagaaagcgccacgcttcccgaagggagaaaggcggacaggtatccggtaagcggcagggtcggaacaggagagcgcacgagggagcttccagggggaaacgcctggtatctttatagtcctgtcgggtttcgccacctctgacttgagcgtcgatttttgtgatgctcgtcaggggggcggagcctatggaaaaacgccagcaacgcggcctttttacggttcctggccttttgctggccttttgctcacatgtcctgcaggcag

SEQ ID NO: 10501 - DNA, 130 bp, synthetic construct
  misc_feature 1..130: note = pOB1005, 5'ITR
  source 1..130: mol_type = other DNA
ctgcgcgctcgctcgctcactgaggccgcccgggcaaagcccgggcgtcgggcgacctttggtcgcccggcctcagtgagcgagcgagcgcgcagagagggagtggccaactccatcactaggggttcct

SEQ ID NO: 10502-10504 - skipped (3 entries)

SEQ ID NO: 10505 - DNA, 366 bp, synthetic construct; identical to SEQ ID NO: 9905
  misc_feature 1..366: note = pOB1005, CMV Enhancer
  source 1..366: mol_type = other DNA

SEQ ID NO: 10506 - skipped

SEQ ID NO: 10507 - DNA, 278 bp, synthetic construct; identical to SEQ ID NO: 10
  misc_feature 1..278: note = pOB1005, CBA Promoter
  source 1..278: mol_type = other DNA

SEQ ID NO: 10508 - DNA, 93 bp, synthetic construct; identical to SEQ ID NO: 11
  misc_feature 1..93: note = pOB1005, beta-actin Exon
  source 1..93: mol_type = other DNA

SEQ ID NO: 10509 - DNA, 155 bp, synthetic construct; identical to SEQ ID NO: 9909
  misc_feature 1..155: note = pOB1005, Chimeric Intron
  source 1..155: mol_type = other DNA

SEQ ID NO: 10510 - skipped

SEQ ID NO: 10511 - DNA, 10 bp, synthetic construct
  misc_feature 1..10: note = pOB1005, Kozak Sequence
  source 1..10: mol_type = other DNA
tccaccatgc

SEQ ID NO: 10512 - DNA, 2241 bp, synthetic construct
  misc_feature 1..2241: note = pOB1005, hABCD1/9nt
  source 1..2241: mol_type = other DNA
atgccggtgctctctaggccccggccctggcgggggaacacgctgaagcgcacggccgtgctcctggccctcgcggcctatggagcccacaaagtctaccccttggtgcgccagtgcctggccccggctaggggtcttcaggcgcccgccggggagcccacgcaggaggcctccggggtcgcggcggccaaagctggcatgaaccgggtattcctgcagcggctcctctggctcctgcggctgctgttcccccgggtcctctgccgggagacggggctgctggccctgcactcggccgccttggtgagccgcaccttcctgtcggtgtacgtggcccgcctggacggaaggctggcccgctgcatcgtccgcaaggacccgcgggcttttggctggcagctgctgcagtggctcctcatcgccctccctgctaccttcgtcaacagtgccatccgttacctggagggccaactggccctgtcgttccgcagccgtctggtggcccacgcctaccgcctctacttctcccagcagacctactaccgggtcagcaacatggacgggcggcttcgcaaccctgaccagtctctgacggaggacgtggtggcctttgcggcctctgtggcccacctctactccaacctgaccaagccactcctggacgtggctgtgacttcctacaccctgcttcgggcggcccgctcccgcggagccggcacagcctggccctcggccatcgccggcctcgtggtgttcctcacggccaacgtgctgcgggccttctcgcccaagttcggggagctggtggcagaggaggcgcggcggaagggggagctgcgctacatgcactcgcgtgtggtggccaactcggaggagatcgccttctatgggggccatgaggtggagctggccctgctacagcgctcctaccaggacctggcctcgcagatcaacctcatccttctggaacgcctctggtatgttatgctggagcagttcctcatgaagtatgtgtggagcgcctcgggcctgctcatggtggctgtccccatcatcactgccactggctactcagagtcagatgcagaggccgtgaagaaggcagccttggaaaagaaggaggaggagctggtgagcgagcgcacagaagccttcactattgcccgcaacctcctgacagcggctgcagatgccattgagcggatcatgtcgtcgtacaaggaggtgacggagctggctggctacacagcccgggtgcacgagatgttccaggtatttgaagatgttcagcgctgtcacttcaagaggcccagggagctagaggacgctcaggcggggtctgggaccataggccggtctggtgtccgtgtggagggccccctgaagatccgaggccaggtggtggacgtggaacaggggatcatctgcgagaacatccccatcgtcacgccctcaggagaggtggtggtggccagcctcaacatcagggtggaggaaggcatgcatctgctcatcacaggccccaatggctgcggcaagagctccctgttccggatcctgggtgggctctggcccacgtacggtggtgtgctctacaagcccccaccccagcgcatgttctacatcccgcagaggccctacatgtctgtgggctccctgcgtgaccaggtgatctacccggactcagtggaggacatgcaaaggaagggctactcggagcaggacctggaagccatcctggacgtcgtgcacctgcaccacatcctgcagcgggagggaggttgggaggctatgtgtgactggaaggacgtcctgtcgggtggcgagaagcagagaatcggcatggcccgcatgttctaccacaggcccaagtacgccctcctggatgaatgcaccagcgccgttagcatcgacgtggaaggcaagatcttccaggcggccaaggacgcgggcattgccctgctctccatcacccaccggccctccctgtggaaataccacacacacttgctacagttcgatggggagggcggctggaagttcgagaagctggactcagctgcccgcctgagcctgacggaggagaagcagcggctggagcagcagctggcgggcattcccaagatgcagcggcgcctccaggagctctgccagatcctgggcgaggccgtggccccagcgcatgtgccggcacctagcccgcaaggccctggtggcctccagggtgcctccacctgataa

SEQ ID NO: 10513 - skipped

SEQ ID NO: 10514 - DNA, 135 bp, synthetic construct
  misc_feature 1..135: note = pOB1005, SV40 pA
  source 1..135: mol_type = other DNA
gatccagacatgataagatacattgatgagtttggacaaaccacaactagaatgcagtgaaaaaaatgctttatttgtgaaatttgtgatgctattgctttatttgtaaccattataagctgcaataaacaagtt

SEQ ID NO: 10515-10517 - skipped (3 entries)

SEQ ID NO: 10518 - DNA, 130 bp, synthetic construct
  misc_feature 1..130: note = pOB1005, 3'ITR
  source 1..130: mol_type = other DNA
aggaacccctagtgatggagttggccactccctctctgcgcgctcgctcgctcactgaggccgggcgaccaaaggtcgcccgacgcccgggctttgcccgggcggcctcagtgagcgagcgagcgcgcag

SEQ ID NO: 10519-10549 - skipped (31 entries)

SEQ ID NO: 10550 - DNA, 3691 bp, synthetic construct
  misc_feature 1..3691: note = pOB1005, ITR-ITR
  source 1..3691: mol_type = other DNA
ctgcgcgctcgctcgctcactgaggccgcccgggcaaagcccgggcgtcgggcgacctttggtcgcccggcctcagtgagcgagcgagcgcgcagagagggagtggccaactccatcactaggggttcctgcggccgcaaccgtctagttattaatagtaatcaattacggggtcattagttcatagcccatatatggagttccgcgttacataacttacggtaaatggcccgcctggctgaccgcccaacgacccccgcccattgacgtcaataatgacgtatgttcccatagtaacgccaatagggactttccattgacgtcaatgggtggagtatttacggtaaactgcccacttggcagtacatcaagtgtatcatatgccaagtacgccccctattgacgtcaatgacggtaaatggcccgcctggcattatgcccagtacatgaccttatgggactttcctacttggcagtacatctacgtattagtcatcgctattaccatggtcgaggtgagccccacgttctgcttcactctccccatctcccccccctccccacccccaattttgtatttatttattttttaattattttgtgcagcgatgggggcggggggggggggggggcgcgcgccaggcggggcggggcggggcgaggggcggggcggggcgaggcggagaggtgcggcggcagccaatcagagcggcgcgctccgaaagtttccttttatggcgaggcggcggcggcggcggccctataaaaagcgaagcgcgcggcgggcgggagtcgctgcgcgctgccttcgccccgtgccccgctccgccgccgcctcgcgccgcccgccccggctctgactgaccgcgttactcccacaggtgagcgggcgggacggcccttctcctccgggctgtaattagcgcttggtttaatgacggcttgtttcttttctgtggctgcgtgaaagccttgaggggctccgggagctagagcctctgctaaccatgttcatgccttcttctttttcctacagctcctgggcaacgtgctggttattgtgctgtctcatcattttggcaaagaattcctcgaagatccgaaggggttcaagctcgcgtattgggatagcttccaccatgccggtgctctctaggccccggccctggcgggggaacacgctgaagcgcacggccgtgctcctggccctcgcggcctatggagcccacaaagtctaccccttggtgcgccagtgcctggccccggctaggggtcttcaggcgcccgccggggagcccacgcaggaggcctccggggtcgcggcggccaaagctggcatgaaccgggtattcctgcagcggctcctctggctcctgcggctgctgttcccccgggtcctctgccgggagacggggctgctggccctgcactcggccgccttggtgagccgcaccttcctgtcggtgtacgtggcccgcctggacggaaggctggcccgctgcatcgtccgcaaggacccgcgggcttttggctggcagctgctgcagtggctcctcatcgccctccctgctaccttcgtcaacagtgccatccgttacctggagggccaactggccctgtcgttccgcagccgtctggtggcccacgcctaccgcctctacttctcccagcagacctactaccgggtcagcaacatggacgggcggcttcgcaaccctgaccagtctctgacggaggacgtggtggcctttgcggcctctgtggcccacctctactccaacctgaccaagccactcctggacgtggctgtgacttcctacaccctgcttcgggcggcccgctcccgcggagccggcacagcctggccctcggccatcgccggcctcgtggtgttcctcacggccaacgtgctgcgggccttctcgcccaagttcggggagctggtggcagaggaggcgcggcggaagggggagctgcgctacatgcactcgcgtgtggtggccaactcggaggagatcgccttctatgggggccatgaggtggagctggccctgctacagcgctcctaccaggacctggcctcgcagatcaacctcatccttctggaacgcctctggtatgttatgctggagcagttcctcatgaagtatgtgtggagcgcctcgggcctgctcatggtggctgtccccatcatcactgccactggctactcagagtcagatgcagaggccgtgaagaaggcagccttggaaaagaaggaggaggagctggtgagcgagcgcacagaagccttcactattgcccgcaacctcctgacagcggctgcagatgccattgagcggatcatgtcgtcgtacaaggaggtgacggagctggctggctacacagcccgggtgcacgagatgttccaggtatttgaagatgttcagcgctgtcacttcaagaggcccagggagctagaggacgctcaggcggggtctgggaccataggccggtctggtgtccgtgtggagggccccctgaagatccgaggccaggtggtggacgtggaacaggggatcatctgcgagaacatccccatcgtcacgccctcaggagaggtggtggtggccagcctcaacatcagggtggaggaaggcatgcatctgctcatcacaggccccaatggctgcggcaagagctccctgttccggatcctgggtgggctctggcccacgtacggtggtgtgctctacaagcccccaccccagcgcatgttctacatcccgcagaggccctacatgtctgtgggctccctgcgtgaccaggtgatctacccggactcagtggaggacatgcaaaggaagggctactcggagcaggacctggaagccatcctggacgtcgtgcacctgcaccacatcctgcagcgggagggaggttgggaggctatgtgtgactggaaggacgtcctgtcgggtggcgagaagcagagaatcggcatggcccgcatgttctaccacaggcccaagtacgccctcctggatgaatgcaccagcgccgttagcatcgacgtggaaggcaagatcttccaggcggccaaggacgcgggcattgccctgctctccatcacccaccggccctccctgtggaaataccacacacacttgctacagttcgatggggagggcggctggaagttcgagaagctggactcagctgcccgcctgagcctgacggaggagaagcagcggctggagcagcagctggcgggcattcccaagatgcagcggcgcctccaggagctctgccagatcctgggcgaggccgtggccccagcgcatgtgccggcacctagcccgcaaggccctggtggcctccagggtgcctccacctgataactcgagctagcggccgctctagaaagagatccagacatgataagatacattgatgagtttggacaaaccacaactagaatgcagtgaaaaaaatgctttatttgtgaaatttgtgatgctattgctttatttgtaaccattataagctgcaataaacaagttgtgcggaccgagcggccgcaggaacccctagtgatggagttggccactccctctctgcgcgctcgctcgctcactgaggccgggcgaccaaaggtcgcccgacgcccgggctttgcccgggcggcctcagtgagcgagcgagcgcgcag

SEQ ID NO: 10551-10559 - skipped (9 entries)

SEQ ID NO: 10560 - DNA, 3719 bp, synthetic construct
  misc_feature 1..3719: note = pOB1005, rAAV vector genome
  source 1..3719: mol_type = other DNA
tggccactccctctctgcgcgctcgctcgctcactgaggccgcccgggcaaagcccgggcgtcgggcgacctttggtcgcccggcctcagtgagcgagcgagcgcgcagagagggagtggccaactccatcactaggggttcctgcggccgcaaccgtctagttattaatagtaatcaattacggggtcattagttcatagcccatatatggagttccgcgttacataacttacggtaaatggcccgcctggctgaccgcccaacgacccccgcccattgacgtcaataatgacgtatgttcccatagtaacgccaatagggactttccattgacgtcaatgggtggagtatttacggtaaactgcccacttggcagtacatcaagtgtatcatatgccaagtacgccccctattgacgtcaatgacggtaaatggcccgcctggcattatgcccagtacatgaccttatgggactttcctacttggcagtacatctacgtattagtcatcgctattaccatggtcgaggtgagccccacgttctgcttcactctccccatctcccccccctccccacccccaattttgtatttatttattttttaattattttgtgcagcgatgggggcggggggggggggggggcgcgcgccaggcggggcggggcggggcgaggggcggggcggggcgaggcggagaggtgcggcggcagccaatcagagcggcgcgctccgaaagtttccttttatggcgaggcggcggcggcggcggccctataaaaagcgaagcgcgcggcgggcgggagtcgctgcgcgctgccttcgccccgtgccccgctccgccgccgcctcgcgccgcccgccccggctctgactgaccgcgttactcccacaggtgagcgggcgggacggcccttctcctccgggctgtaattagcgcttggtttaatgacggcttgtttcttttctgtggctgcgtgaaagccttgaggggctccgggagctagagcctctgctaaccatgttcatgccttcttctttttcctacagctcctgggcaacgtgctggttattgtgctgtctcatcattttggcaaagaattcctcgaagatccgaaggggttcaagctcgcgtattgggatagcttccaccatgccggtgctctctaggccccggccctggcgggggaacacgctgaagcgcacggccgtgctcctggccctcgcggcctatggagcccacaaagtctaccccttggtgcgccagtgcctggccccggctaggggtcttcaggcgcccgccggggagcccacgcaggaggcctccggggtcgcggcggccaaagctggcatgaaccgggtattcctgcagcggctcctctggctcctgcggctgctgttcccccgggtcctctgccgggagacggggctgctggccctgcactcggccgccttggtgagccgcaccttcctgtcggtgtacgtggcccgcctggacggaaggctggcccgctgcatcgtccgcaaggacccgcgggcttttggctggcagctgctgcagtggctcctcatcgccctccctgctaccttcgtcaacagtgccatccgttacctggagggccaactggccctgtcgttccgcagccgtctggtggcccacgcctaccgcctctacttctcccagcagacctactaccgggtcagcaacatggacgggcggcttcgcaaccctgaccagtctctgacggaggacgtggtggcctttgcggcctctgtggcccacctctactccaacctgaccaagccactcctggacgtggctgtgacttcctacaccctgcttcgggcggcccgctcccgcggagccggcacagcctggccctcggccatcgccggcctcgtggtgttcctcacggccaacgtgctgcgggccttctcgcccaagttcggggagctggtggcagaggaggcgcggcggaagggggagctgcgctacatgcactcgcgtgtggtggccaactcggaggagatcgccttctatgggggccatgaggtggagctggccctgctacagcgctcctaccaggacctggcctcgcagatcaacctcatccttctggaacgcctctggtatgttatgctggagcagttcctcatgaagtatgtgtggagcgcctcgggcctgctcatggtggctgtccccatcatcactgccactggctactcagagtcagatgcagaggccgtgaagaaggcagccttggaaaagaaggaggaggagctggtgagcgagcgcacagaagccttcactattgcccgcaacctcctgacagcggctgcagatgccattgagcggatcatgtcgtcgtacaaggaggtgacggagctggctggctacacagcccgggtgcacgagatgttccaggtatttgaagatgttcagcgctgtcacttcaagaggcccagggagctagaggacgctcaggcggggtctgggaccataggccggtctggtgtccgtgtggagggccccctgaagatccgaggccaggtggtggacgtggaacaggggatcatctgcgagaacatccccatcgtcacgccctcaggagaggtggtggtggccagcctcaacatcagggtggaggaaggcatgcatctgctcatcacaggccccaatggctgcggcaagagctccctgttccggatcctgggtgggctctggcccacgtacggtggtgtgctctacaagcccccaccccagcgcatgttctacatcccgcagaggccctacatgtctgtgggctccctgcgtgaccaggtgatctacccggactcagtggaggacatgcaaaggaagggctactcggagcaggacctggaagccatcctggacgtcgtgcacctgcaccacatcctgcagcgggagggaggttgggaggctatgtgtgactggaaggacgtcctgtcgggtggcgagaagcagagaatcggcatggcccgcatgttctaccacaggcccaagtacgccctcctggatgaatgcaccagcgccgttagcatcgacgtggaaggcaagatcttccaggcggccaaggacgcgggcattgccctgctctccatcacccaccggccctccctgtggaaataccacacacacttgctacagttcgatggggagggcggctggaagttcgagaagctggactcagctgcccgcctgagcctgacggaggagaagcagcggctggagcagcagctggcgggcattcccaagatgcagcggcgcctccaggagctctgccagatcctgggcgaggccgtggccccagcgcatgtgccggcacctagcccgcaaggccctggtggcctccagggtgcctccacctgataactcgagctagcggccgctctagaaagagatccagacatgataagatacattgatgagtttggacaaaccacaactagaatgcagtgaaaaaaatgctttatttgtgaaatttgtgatgctattgctttatttgtaaccattataagctgcaataaacaagttgtgcggaccgagcggccgcaggaacccctagtgatggagttggccactccctctctgcgcgctcgctcgctcactgaggccgggcgaccaaaggtcgcccgacgcccgggctttgcccgggcggcctcagtgagcgagcgagcgcgcagagagggagtggcca

SEQ ID NO: 10561-10584 - skipped (24 entries)

SEQ ID NO: 10585 - DNA, 54 bp, synthetic construct; identical to SEQ ID NO: 9985
  misc_feature 1..54: note = pOB1005, Rabbit beta-globin exon
  source 1..54: mol_type = other DNA

SEQ ID NO: 10586-10999 - skipped (414 entries)

SEQ ID NO: 11000 - DNA, 6598 bp, synthetic construct
  misc_feature 1..6598: note = pOB1010, full plasmid
  source 1..6598: mol_type = other DNA
ctgcgcgctcgctcgctcactgaggccgcccgggcaaagcccgggcgtcgggcgacctttggtcgcccggcctcagtgagcgagcgagcgcgcagagagggagtggccaactccatcactaggggttcctgcggccgcaaccgtctagttattaatagtaatcaattacggggtcattagttcatagcccatatatggagttccgcgttacataacttacggtaaatggcccgcctggctgaccgcccaacgacccccgcccattgacgtcaataatgacgtatgttcccatagtaacgccaatagggactttccattgacgtcaatgggtggagtatttacggtaaactgcccacttggcagtacatcaagtgtatcatatgccaagtacgccccctattgacgtcaatgacggtaaatggcccgcctggcattatgcccagtacatgaccttatgggactttcctacttggcagtacatctacgtattagtcatcgctattaccatggtcgaggtgagccccacgttctgcttcactctccccatctcccccccctccccacccccaattttgtatttatttattttttaattattttgtgcagcgatgggggcggggggggggggggggcgcgcgccaggcggggcggggcggggcgaggggcggggcggggcgaggcggagaggtgcggcggcagccaatcagagcggcgcgctccgaaagtttccttttatggcgaggcggcggcggcggcggccctataaaaagcgaagcgcgcggcgggcgggagtcgctgcgcgctgccttcgccccgtgccccgctccgccgccgcctcgcgccgcccgccccggctctgactgaccgcgttactcccacaggtgagcgggcgggacggcccttctcctccgggctgtaattagcgcttggtttaatgacggcttgtttcttttctgtggctgcgtgaaagccttgaggggctccgggagctagagcctctgctaaccatgttcatgccttcttctttttcctacagctcctgggcaacgtgctggttattgtgctgtctcatcattttggcaaagaattcctcgaagatccgaaggggttcaagctttccagttgcctagacaacaggcccagggtcagagcaacaatccttccagccacctgcctcaactgctgccccaggcaccagccccagtccctacgcggcagccagcccaggtgacatgccggtgctctccaggccccggccctggcgggggaacacgctgaagcgcacggccgtgctcctggccctcgcggcctatggagcccacaaagtctaccccttggtgcgccagtgcctggccccggccaggggtcttcaggcgcccgccggggagcccacgcaggaggcctccggggtcgcggcggccaaagctggcatgaaccgggtattcctgcagcggctcctgtggctcctgcggctgctgttcccccgggtcctgtgccgggagacggggctgctggccctgcactcggccgccttggtgagccgcaccttcctgtcggtgtatgtggcccgcctggacggaaggctggcccgctgcatcgtccgcaaggacccgcgggcttttggctggcagctgctgcagtggctcctcatcgccctccctgctaccttcgtcaacagtgccatccgttacctggagggccaactggccctgtcgttccgcagccgtctggtggcccacgcctaccgcctctacttctcccagcagacctactaccgggtcagcaacatggacgggcggcttcgcaaccctgaccagtctctgacggaggacgtggtggcctttgcggcctctgtggcccacctctactccaacctgaccaagccactcctggacgtggctgtgacttcctacaccctgcttcgggcggcccgctcccgtggagccggcacagcctggccctcggccatcgccggcctcgtggtgttcctcacggccaacgtgctgcgggccttctcgcccaagttcggggagctggtggcagaggaggcgcggcggaagggggagctgcgctacatgcactcgcgtgtggtggccaactcggaggagatcgccttctatgggggccatgaggtggagctggccctgctacagcgctcctaccaggacctggcctcgcagatcaacctcatccttctggaacgcctgtggtatgttatgctggagcagttcctcatgaagtatgtgtggagcgcctcgggcctgctcatggtggctgtccccatcatcactgccactggctactcagagtcagatgcagaggccgtgaagaaggcagccttggaaaagaaggaggaggagctggtgagcgagcgcacagaagccttcactattgcccgcaacctcctgacagcggctgcagatgccattgagcggatcatgtcgtcgtacaaggaggtgacggagctggctggctacacagcccgggtgcacgagatgttccaggtatttgaagatgttcagcgctgtcacttcaagaggcccagggagctagaggacgctcaggcggggtctgggaccataggccggtctggtgtccgtgtggagggccccctgaagatccgaggccaggtggtggatgtggaacaggggatcatctgcgagaacatccccatcgtcacgccctcaggagaggtggtggtggccagcctcaacatcagggtggaggaaggcatgcatctgctcatcacaggccccaatggctgcggcaagagctccctgttccggatcctgggtgggctctggcccacgtacggtggtgtgctctacaagcccccaccccagcgcatgttctacatcccgcagaggccctacatgtctgtgggctccctgcgtgaccaggtgatctacccggactcagtggaggacatgcaaaggaagggctactcggagcaggacctggaagccatcctggacgtcgtgcacctgcaccacatcctgcagcgggagggaggttgggaggctatgtgtgactggaaggacgtcctgtcgggtggcgagaagcagagaatcggcatggcccgcatgttctaccacaggcccaagtacgccctcctggatgaatgcaccagcgccgtgagcatcgacgtggaaggcaagatcttccaggcggccaaggacgcgggcattgccctgctctccatcacccaccggccctccctgtggaaataccacacacacttgctacagttcgatggggagggcggctggaagttcgagaagctggactcagctgcccgcctgagcctgacggaggagaagcagcggctggagcagcagctggcgggcattcccaagatgcagcggcgcctccaggagctctgccagatcctgggcgaggccgtggccccagcgcatgtgccggcacctagcccgcaaggccctggtggcctccagggtgcctccacctgacacaaccgtccccggcccctgccccgcccccaagctcggatcacatgaattctgcagatatccagcacagtggcggccgctcgagctagcggccgctctagaaagagatccagacatgataagatacattgatgagtttggacaaaccacaactagaatgcagtgaaaaaaatgctttatttgtgaaatttgtgatgctattgctttatttgtaaccattataagctgcaataaacaagttaacaacaacaattgcattcattttatgtttcaggttcagggggaggtgtgggaggttttttagtcgactagagctcgctgatcagcctcgactgtgccttctagttgccagccatctgttgtttgcccctcccccgtgccttccttgaccctggaaggtgccactcccactgtcctttcctaataaaatgaggaaattgcatcgcattgtctgagtaggtgtcattctattctggggggtggggtggggcaggacagcaagggggaggattgggaagacaatagcaggcatgctggggagagatcgtgcggaccgagcggccgcaggaacccctagtgatggagttggccactccctctctgcgcgctcgctcgctcactgaggccgggcgaccaaaggtcgcccgacgcccgggctttgcccgggcggcctcagtgagcgagcgagcgcgcagctgcctgcaggggcgcctgatgcggtattttctccttacgcatctgtgcggtatttcacaccgcatacgtcaaagcaaccatagtacgcgccctgtagcggcgcattaagcgcggcgggtgtggtggttacgcgcagcgtgaccgctacacttgccagcgccttagcgcccgctcctttcgctttcttcccttcctttctcgccacgttcgccggctttccccgtcaagctctaaatcgggggctccctttagggttccgatttagtgctttacggcacctcgaccccaaaaaacttgatttgggtgatggttcacgtagtgggccatcgccctgatagacggtttttcgccctttgacgttggagtccacgttctttaatagtggactcttgttccaaactggaacaacactcaactctatctcgggctattcttttgatttataagggattttgccgatttcggtctattggttaaaaaatgagctgatttaacaaaaatttaacgcgaattttaacaaaatattaacgtttacaattttatggtgcactctcagtacaatctgctctgatgccgcatagttaagccagccccgacacccgccaacacccgctgacgcgccctgacgggcttgtctgctcccggcatccgcttacagacaagctgtgaccgtctccgggagctgcatgtgtcagaggttttcaccgtcatcaccgaaacgcgcgagacgaaagggcctcgtgatacgcctatttttataggttaatgtcatgacgcggaacccctatttgtttatttttctaaatacattcaaatatgtatccgctcatgagacaataaccctgataaatgcttcaataatattgaaaaaggaagagtatgagccatattcaacgggaaacgtcttgctctaggccgcgattaaattccaacatggatgctgatttatatgggtataaatgggctcgcgataatgtcgggcaatcaggtgcgacaatctatcgattgtatgggaagcccgatgcgccagagttgtttctgaaacatggcaaaggtagcgttgccaatgatgttacagatgagatggtcagactaaactggctgacggaatttatgcctcttccgaccatcaagcattttatccgtactcctgatgatgcatggttactcaccactgcgatccctgggaaaacagcattccaggtattagaagaatatcctgattcaggtgaaaatattgttgatgcgctggcagtgttcctgcgccggttgcattcgattcctgtttgtaattgtccttttaacagcgatcgcgtatttcgtctcgctcaggcgcaatcacgaatgaataacggtttggttgatgcgagtgattttgatgacgagcgtaatggctggcctgttgaacaagtctggaaagaaatgcataaacttttgccattctcaccggattcagtcgtcactcatggtgatttctcacttgataaccttatttttgacgaggggaaattaataggttgtattgatgttggacgagtcggaatcgcagaccgataccaggatcttgccatcctatggaactgcctcggtgagttttctccttcattacagaaacggctttttcaaaaatatggtattgataatcctgatatgaataaattgcagtttcatttgatgctcgatgagtttttctaatcatgaccaaaatcccttaacgtgagttttcgttccactgagcgtcagaccccgtagaaaagatcaaaggatcttcttgagatcctttttttctgcgcgtaatctgctgcttgcaaacaaaaaaaccaccgctaccagcggtggtttgtttgccggatcaagagctaccaactctttttccgaaggtaactggcttcagcagagcgcagataccaaatactgttcttctagtgtagccgtagttaggccaccacttcaagaactctgtagcaccgcctacatacctcgctctgctaatcctgttaccagtggctgctgccagtggcgataagtcgtgtcttaccgggttggactcaagacgatagttaccggataaggcgcagcggtcgggctgaacggggggttcgtgcacacagcccagcttggagcgaacgacctacaccgaactgagatacctacagcgtgagctatgagaaagcgccacgcttcccgaagggagaaaggcggacaggtatccggtaagcggcagggtcggaacaggagagcgcacgagggagcttccagggggaaacgcctggtatctttatagtcctgtcgggtttcgccacctctgacttgagcgtcgatttttgtgatgctcgtcaggggggcggagcctatggaaaaacgccagcaacgcggcctttttacggttcctggccttttgctggccttttgctcacatgtcctgcaggcag

SEQ ID NO: 11001 - DNA, 130 bp, synthetic construct; identical to SEQ ID NO: 10501
  misc_feature 1..130: note = pOB1010, 5'ITR
  source 1..130: mol_type = other DNA

SEQ ID NO: 11002-11004 - skipped (3 entries)

SEQ ID NO: 11005 - DNA, 366 bp, synthetic construct; identical to SEQ ID NO: 9905
  misc_feature 1..366: note = pOB1010, CMV Enhancer
  source 1..366: mol_type = other DNA

SEQ ID NO: 11006 - skipped

SEQ ID NO: 11007 - DNA, 278 bp, synthetic construct; identical to SEQ ID NO: 10
  misc_feature 1..278: note = pOB1010, CBA Promoter
  source 1..278: mol_type = other DNA

SEQ ID NO: 11008 - DNA, 93 bp, synthetic construct; identical to SEQ ID NO: 11
  misc_feature 1..93: note = pOB1010, beta-actin Exon
  source 1..93: mol_type = other DNA

SEQ ID NO: 11009 - DNA, 155 bp, synthetic construct; identical to SEQ ID NO: 9909
  misc_feature 1..155: note = pOB1010, Chimeric Intron
  source 1..155: mol_type = other DNA

SEQ ID NO: 11010 - DNA, 117 bp, synthetic construct; identical to SEQ ID NO: 9910
  misc_feature 1..117: note = pOB1010, hABCD1 5' UTR
  source 1..117: mol_type = other DNA

SEQ ID NO: 11011 - skipped

SEQ ID NO: 11012 - DNA, 2238 bp, synthetic construct; identical to SEQ ID NO: 204
  misc_feature 1..2238: note = pOB1010, hABCD1
  source 1..2238: mol_type = other DNA

SEQ ID NO: 11013 - DNA, 49 bp, synthetic construct; identical to SEQ ID NO: 9913
  misc_feature 1..49: note = pOB1010, hABCD1 3' UTR
  source 1..49: mol_type = other DNA

SEQ ID NO: 11014 - DNA, 197 bp, synthetic construct; identical to SEQ ID NO: 9914
  misc_feature 1..197: note = pOB1010, SV40 pA
  source 1..197: mol_type = other DNA

SEQ ID NO: 11015 - skipped

SEQ ID NO: 11016 - DNA, 208 bp, synthetic construct; identical to SEQ ID NO: 9916
  misc_feature 1..208: note = pOB1010, bGH pA
  source 1..208: mol_type = other DNA

SEQ ID NO: 11017 - skipped

SEQ ID NO: 11018 - DNA, 130 bp, synthetic construct; identical to SEQ ID NO: 10518
  misc_feature 1..130: note = pOB1010, 3'ITR
  source 1..130: mol_type = other DNA

SEQ ID NO: 11019-11034 - skipped (16 entries)

SEQ ID NO: 11035 - DNA, 434 bp, synthetic construct; identical to SEQ ID NO: 206
  misc_feature 1..434: note = pOB1010, Total polyA
  source 1..434: mol_type = other DNA

SEQ ID NO: 11036-11049 - skipped (14 entries)

SEQ ID NO: 11050 - DNA, 4165 bp, synthetic construct
  misc_feature 1..4165: note = pOB1010, ITR-ITR
  source 1..4165: mol_type = other DNA
ctgcgcgctcgctcgctcactgaggccgcccgggcaaagcccgggcgtcgggcgacctttggtcgcccggcctcagtgagcgagcgagcgcgcagagagggagtggccaactccatcactaggggttcctgcggccgcaaccgtctagttattaatagtaatcaattacggggtcattagttcatagcccatatatggagttccgcgttacataacttacggtaaatggcccgcctggctgaccgcccaacgacccccgcccattgacgtcaataatgacgtatgttcccatagtaacgccaatagggactttccattgacgtcaatgggtggagtatttacggtaaactgcccacttggcagtacatcaagtgtatcatatgccaagtacgccccctattgacgtcaatgacggtaaatggcccgcctggcattatgcccagtacatgaccttatgggactttcctacttggcagtacatctacgtattagtcatcgctattaccatggtcgaggtgagccccacgttctgcttcactctccccatctcccccccctccccacccccaattttgtatttatttattttttaattattttgtgcagcgatgggggcggggggggggggggggcgcgcgccaggcggggcggggcggggcgaggggcggggcggggcgaggcggagaggtgcggcggcagccaatcagagcggcgcgctccgaaagtttccttttatggcgaggcggcggcggcggcggccctataaaaagcgaagcgcgcggcgggcgggagtcgctgcgcgctgccttcgccccgtgccccgctccgccgccgcctcgcgccgcccgccccggctctgactgaccgcgttactcccacaggtgagcgggcgggacggcccttctcctccgggctgtaattagcgcttggtttaatgacggcttgtttcttttctgtggctgcgtgaaagccttgaggggctccgggagctagagcctctgctaaccatgttcatgccttcttctttttcctacagctcctgggcaacgtgctggttattgtgctgtctcatcattttggcaaagaattcctcgaagatccgaaggggttcaagctttccagttgcctagacaacaggcccagggtcagagcaacaatccttccagccacctgcctcaactgctgccccaggcaccagccccagtccctacgcggcagccagcccaggtgacatgccggtgctctccaggccccggccctggcgggggaacacgctgaagcgcacggccgtgctcctggccctcgcggcctatggagcccacaaagtctaccccttggtgcgccagtgcctggccccggccaggggtcttcaggcgcccgccggggagcccacgcaggaggcctccggggtcgcggcggccaaagctggcatgaaccgggtattcctgcagcggctcctgtggctcctgcggctgctgttcccccgggtcctgtgccgggagacggggctgctggccctgcactcggccgccttggtgagccgcaccttcctgtcggtgtatgtggcccgcctggacggaaggctggcccgctgcatcgtccgcaaggacccgcgggcttttggctggcagctgctgcagtggctcctcatcgccctccctgctaccttcgtcaacagtgccatccgttacctggagggccaactggccctgtcgttccgcagccgtctggtggcccacgcctaccgcctctacttctcccagcagacctactaccgggtcagcaacatggacgggcggcttcgcaaccctgaccagtctctgacggaggacgtggtggcctttgcggcctctgtggcccacctctactccaacctgaccaagccactcctggacgtggctgtgacttcctacaccctgcttcgggcggcccgctcccgtggagccggcacagcctggccctcggccatcgccggcctcgtggtgttcctcacggccaacgtgctgcgggccttctcgcccaagttcggggagctggtggcagaggaggcgcggcggaagggggagctgcgctacatgcactcgcgtgtggtggccaactcggaggagatcgccttctatgggggccatgaggtggagctggccctgctacagcgctcctaccaggacctggcctcgcagatcaacctcatccttctggaacgcctgtggtatgttatgctggagcagttcctcatgaagtatgtgtggagcgcctcgggcctgctcatggtggctgtccccatcatcactgccactggctactcagagtcagatgcagaggccgtgaagaaggcagccttggaaaagaaggaggaggagctggtgagcgagcgcacagaagccttcactattgcccgcaacctcctgacagcggctgcagatgccattgagcggatcatgtcgtcgtacaaggaggtgacggagctggctggctacacagcccgggtgcacgagatgttccaggtatttgaagatgttcagcgctgtcacttcaagaggcccagggagctagaggacgctcaggcggggtctgggaccataggccggtctggtgtccgtgtggagggccccctgaagatccgaggccaggtggtggatgtggaacaggggatcatctgcgagaacatccccatcgtcacgccctcaggagaggtggtggtggccagcctcaacatcagggtggaggaaggcatgcatctgctcatcacaggccccaatggctgcggcaagagctccctgttccggatcctgggtgggctctggcccacgtacggtggtgtgctctacaagcccccaccccagcgcatgttctacatcccgcagaggccctacatgtctgtgggctccctgcgtgaccaggtgatctacccggactcagtggaggacatgcaaaggaagggctactcggagcaggacctggaagccatcctggacgtcgtgcacctgcaccacatcctgcagcgggagggaggttgggaggctatgtgtgactggaaggacgtcctgtcgggtggcgagaagcagagaatcggcatggcccgcatgttctaccacaggcccaagtacgccctcctggatgaatgcaccagcgccgtgagcatcgacgtggaaggcaagatcttccaggcggccaaggacgcgggcattgccctgctctccatcacccaccggccctccctgtggaaataccacacacacttgctacagttcgatggggagggcggctggaagttcgagaagctggactcagctgcccgcctgagcctgacggaggagaagcagcggctggagcagcagctggcgggcattcccaagatgcagcggcgcctccaggagctctgccagatcctgggcgaggccgtggccccagcgcatgtgccggcacctagcccgcaaggccctggtggcctccagggtgcctccacctgacacaaccgtccccggcccctgccccgcccccaagctcggatcacatgaattctgcagatatccagcacagtggcggccgctcgagctagcggccgctctagaaagagatccagacatgataagatacattgatgagtttggacaaaccacaactagaatgcagtgaaaaaaatgctttatttgtgaaatttgtgatgctattgctttatttgtaaccattataagctgcaataaacaagttaacaacaacaattgcattcattttatgtttcaggttcagggggaggtgtgggaggttttttagtcgactagagctcgctgatcagcctcgactgtgccttctagttgccagccatctgttgtttgcccctcccccgtgccttccttgaccctggaaggtgccactcccactgtcctttcctaataaaatgaggaaattgcatcgcattgtctgagtaggtgtcattctattctggggggtggggtggggcaggacagcaagggggaggattgggaagacaatagcaggcatgctggggagagatcgtgcggaccgagcggccgcaggaacccctagtgatggagttggccactccctctctgcgcgctcgctcgctcactgaggccgggcgaccaaaggtcgcccgacgcccgggctttgcccgggcggcctcagtgagcgagcgagcgcgcag

SEQ ID NO: 11051-11059 - skipped (9 entries)

SEQ ID NO: 11060 - DNA, 4193 bp, synthetic construct
  misc_feature 1..4193: note = pOB1010, rAAV vector genome
  source 1..4193: mol_type = other DNA
tggccactccctctctgcgcgctcgctcgctcactgaggccgcccgggcaaagcccgggcgtcgggcgacctttggtcgcccggcctcagtgagcgagcgagcgcgcagagagggagtggccaactccatcactaggggttcctgcggccgcaaccgtctagttattaatagtaatcaattacggggtcattagttcatagcccatatatggagttccgcgttacataacttacggtaaatggcccgcctggctgaccgcccaacgacccccgcccattgacgtcaataatgacgtatgttcccatagtaacgccaatagggactttccattgacgtcaatgggtggagtatttacggtaaactgcccacttggcagtacatcaagtgtatcatatgccaagtacgccccctattgacgtcaatgacggtaaatggcccgcctggcattatgcccagtacatgaccttatgggactttcctacttggcagtacatctacgtattagtcatcgctattaccatggtcgaggtgagccccacgttctgcttcactctccccatctcccccccctccccacccccaattttgtatttatttattttttaattattttgtgcagcgatgggggcggggggggggggggggcgcgcgccaggcggggcggggcggggcgaggggcggggcggggcgaggcggagaggtgcggcggcagccaatcagagcggcgcgctccgaaagtttccttttatggcgaggcggcggcggcggcggccctataaaaagcgaagcgcgcggcgggcgggagtcgctgcgcgctgccttcgccccgtgccccgctccgccgccgcctcgcgccgcccgccccggctctgactgaccgcgttactcccacaggtgagcgggcgggacggcccttctcctccgggctgtaattagcgcttggtttaatgacggcttgtttcttttctgtggctgcgtgaaagccttgaggggctccgggagctagagcctctgctaaccatgttcatgccttcttctttttcctacagctcctgggcaacgtgctggttattgtgctgtctcatcattttggcaaagaattcctcgaagatccgaaggggttcaagctttccagttgcctagacaacaggcccagggtcagagcaacaatccttccagccacctgcctcaactgctgccccaggcaccagccccagtccctacgcggcagccagcccaggtgacatgccggtgctctccaggccccggccctggcgggggaacacgctgaagcgcacggccgtgctcctggccctcgcggcctatggagcccacaaagtctaccccttggtgcgccagtgcctggccccggccaggggtcttcaggcgcccgccggggagcccacgcaggaggcctccggggtcgcggcggccaaagctggcatgaaccgggtattcctgcagcggctcctgtggctcctgcggctgctgttcccccgggtcctgtgccgggagacggggctgctggccctgcactcggccgccttggtgagccgcaccttcctgtcggtgtatgtggcccgcctggacggaaggctggcccgctgcatcgtccgcaaggacccgcgggcttttggctggcagctgctgcagtggctcctcatcgccctccctgctaccttcgtcaacagtgccatccgttacctggagggccaactggccctgtcgttccgcagccgtctggtggcccacgcctaccgcctctacttctcccagcagacctactaccgggtcagcaacatggacgggcggcttcgcaaccctgaccagtctctgacggaggacgtggtggcctttgcggcctctgtggcccacctctactccaacctgaccaagccactcctggacgtggctgtgacttcctacaccctgcttcgggcggcccgctcccgtggagccggcacagcctggccctcggccatcgccggcctcgtggtgttcctcacggccaacgtgctgcgggccttctcgcccaagttcggggagctggtggcagaggaggcgcggcggaagggggagctgcgctacatgcactcgcgtgtggtggccaactcggaggagatcgccttctatgggggccatgaggtggagctggccctgctacagcgctcctaccaggacctggcctcgcagatcaacctcatccttctggaacgcctgtggtatgttatgctggagcagttcctcatgaagtatgtgtggagcgcctcgggcctgctcatggtggctgtccccatcatcactgccactggctactcagagtcagatgcagaggccgtgaagaaggcagccttggaaaagaaggaggaggagctggtgagcgagcgcacagaagccttcactattgcccgcaacctcctgacagcggctgcagatgccattgagcggatcatgtcgtcgtacaaggaggtgacggagctggctggctacacagcccgggtgcacgagatgttccaggtatttgaagatgttcagcgctgtcacttcaagaggcccagggagctagaggacgctcaggcggggtctgggaccataggccggtctggtgtccgtgtggagggccccctgaagatccgaggccaggtggtggatgtggaacaggggatcatctgcgagaacatccccatcgtcacgccctcaggagaggtggtggtggccagcctcaacatcagggtggaggaaggcatgcatctgctcatcacaggccccaatggctgcggcaagagctccctgttccggatcctgggtgggctctggcccacgtacggtggtgtgctctacaagcccccaccccagcgcatgttctacatcccgcagaggccctacatgtctgtgggctccctgcgtgaccaggtgatctacccggactcagtggaggacatgcaaaggaagggctactcggagcaggacctggaagccatcctggacgtcgtgcacctgcaccacatcctgcagcgggagggaggttgggaggctatgtgtgactggaaggacgtcctgtcgggtggcgagaagcagagaatcggcatggcccgcatgttctaccacaggcccaagtacgccctcctggatgaatgcaccagcgccgtgagcatcgacgtggaaggcaagatcttccaggcggccaaggacgcgggcattgccctgctctccatcacccaccggccctccctgtggaaataccacacacacttgctacagttcgatggggagggcggctggaagttcgagaagctggactcagctgcccgcctgagcctgacggaggagaagcagcggctggagcagcagctggcgggcattcccaagatgcagcggcgcctccaggagctctgccagatcctgggcgaggccgtggccccagcgcatgtgccggcacctagcccgcaaggccctggtggcctccagggtgcctccacctgacacaaccgtccccggcccctgccccgcccccaagctcggatcacatgaattctgcagatatccagcacagtggcggccgctcgagctagcggccgctctagaaagagatccagacatgataagatacattgatgagtttggacaaaccacaactagaatgcagtgaaaaaaatgctttatttgtgaaatttgtgatgctattgctttatttgtaaccattataagctgcaataaacaagttaacaacaacaattgcattcattttatgtttcaggttcagggggaggtgtgggaggttttttagtcgactagagctcgctgatcagcctcgactgtgccttctagttgccagccatctgttgtttgcccctcccccgtgccttccttgaccctggaaggtgccactcccactgtcctttcctaataaaatgaggaaattgcatcgcattgtctgagtaggtgtcattctattctggggggtggggtggggcaggacagcaagggggaggattgggaagacaatagcaggcatgctggggagagatcgtgcggaccgagcggccgcaggaacccctagtgatggagttggccactccctctctgcgcgctcgctcgctcactgaggccgggcgaccaaaggtcgcccgacgcccgggctttgcccgggcggcctcagtgagcgagcgagcgcgcagagagggagtggcca

SEQ ID NO: 11061-11084 - skipped (24 entries)

SEQ ID NO: 11085 - DNA, 54 bp, synthetic construct; identical to SEQ ID NO: 9985
  misc_feature 1..54: note = pOB1010, Rabbit beta-globin exon
  source 1..54: mol_type = other DNA

SEQ ID NO: 11086-11099 - skipped (14 entries)

SEQ ID NO: 11100 - DNA, 6353 bp, synthetic construct
  misc_feature 1..6353: note = pOB1011, full plasmid
  source 1..6353: mol_type = other DNA
ctgcgcgctcgctcgctcactgaggccgcccgggcaaagcccgggcgtcgggcgacctttggtcgcccggcctcagtgagcgagcgagcgcgcagagagggagtggccaactccatcactaggggttcctgcggccgcaaccgtctagttattaatagtaatcaattacggggtcattagttcatagcccatatatggagttccgcgttacataacttacggtaaatggcccgcctggctgaccgcccaacgacccccgcccattgacgtcaataatgacgtatgttcccatagtaacgccaatagggactttccattgacgtcaatgggtggagtatttacggtaaactgcccacttggcagtacatcaagtgtatcatatgccaagtacgccccctattgacgtcaatgacggtaaatggcccgcctggcattatgcccagtacatgaccttatgggactttcctacttggcagtacatctacgtattagtcatcgctattaccatggtcgaggtgagccccacgttctgcttcactctccccatctcccccccctccccacccccaattttgtatttatttattttttaattattttgtgcagcgatgggggcggggggggggggggggcgcgcgccaggcggggcggggcggggcgaggggcggggcggggcgaggcggagaggtgcggcggcagccaatcagagcggcgcgctccgaaagtttccttttatggcgaggcggcggcggcggcggccctataaaaagcgaagcgcgcggcgggcgggagtcgctgcgcgctgccttcgccccgtgccccgctccgccgccgcctcgcgccgcccgccccggctctgactgaccgcgttactcccacaggtgagcgggcgggacggcccttctcctccgggctgtaattagcgcttggtttaatgacggcttgtttcttttctgtggctgcgtgaaagccttgaggggctccgggagctagagcctctgctaaccatgttcatgccttcttctttttcctacagctcctgggcaacgtgctggttattgtgctgtctcatcattttggcaaagaattcctcgaagatccgaaggggttcaagctttccagttgcctagacaacaggcccagggtcagagcaacaatccttccagccacctgcctcaactgctgccccaggcaccagccccagtccctacgcggcagccagcccaggtgacatgccggtgctctccaggccccggccctggcgggggaacacgctgaagcgcacggccgtgctcctggccctcgcggcctatggagcccacaaagtctaccccttggtgcgccagtgcctggccccggccaggggtcttcaggcgcccgccggggagcccacgcaggaggcctccggggtcgcggcggccaaagctggcatgaaccgggtattcctgcagcggctcctgtggctcctgcggctgctgttcccccgggtcctgtgccgggagacggggctgctggccctgcactcggccgccttggtgagccgcaccttcctgtcggtgtatgtggcccgcctggacggaaggctggcccgctgcatcgtccgcaaggacccgcgggcttttggctggcagctgctgcagtggctcctcatcgccctccctgctaccttcgtcaacagtgccatccgttacctggagggccaactggccctgtcgttccgcagccgtctggtggcccacgcctaccgcctctacttctcccagcagacctactaccgggtcagcaacatggacgggcggcttcgcaaccctgaccagtctctgacggaggacgtggtggcctttgcggcctctgtggcccacctctactccaacctgaccaagccactcctggacgtggctgtgacttcctacaccctgcttcgggcggcccgctcccgtggagccggcacagcctggccctcggccatcgccggcctcgtggtgttcctcacggccaacgtgctgcgggccttctcgcccaagttcggggagctggtggcagaggaggcgcggcggaagggggagctgcgctacatgcactcgcgtgtggtggccaactcggaggagatcgccttctatgggggccatgaggtggagctggccctgctacagcgctcctaccaggacctggcctcgcagatcaacctcatccttctggaacgcctgtggtatgttatgctggagcagttcctcatgaagtatgtgtggagcgcctcgggcctgctcatggtggctgtccccatcatcactgccactggctactcagagtcagatgcagaggccgtgaagaaggcagccttggaaaagaaggaggaggagctggtgagcgagcgcacagaagccttcactattgcccgcaacctcctgacagcggctgcagatgccattgagcggatcatgtcgtcgtacaaggaggtgacggagctggctggctacacagcccgggtgcacgagatgttccaggtatttgaagatgttcagcgctgtcacttcaagaggcccagggagctagaggacgctcaggcggggtctgggaccataggccggtctggtgtccgtgtggagggccccctgaagatccgaggccaggtggtggatgtggaacaggggatcatctgcgagaacatccccatcgtcacgccctcaggagaggtggtggtggccagcctcaacatcagggtggaggaaggcatgcatctgctcatcacaggccccaatggctgcggcaagagctccctgttccggatcctgggtgggctctggcccacgtacggtggtgtgctctacaagcccccaccccagcgcatgttctacatcccgcagaggccctacatgtctgtgggctccctgcgtgaccaggtgatctacccggactcagtggaggacatgcaaaggaagggctactcggagcaggacctggaagccatcctggacgtcgtgcacctgcaccacatcctgcagcgggagggaggttgggaggctatgtgtgactggaaggacgtcctgtcgggtggcgagaagcagagaatcggcatggcccgcatgttctaccacaggcccaagtacgccctcctggatgaatgcaccagcgccgtgagcatcgacgtggaaggcaagatcttccaggcggccaaggacgcgggcattgccctgctctccatcacccaccggccctccctgtggaaataccacacacacttgctacagttcgatggggagggcggctggaagttcgagaagctggactcagctgcccgcctgagcctgacggaggagaagcagcggctggagcagcagctggcgggcattcccaagatgcagcggcgcctccaggagctctgccagatcctgggcgaggccgtggccccagcgcatgtgccggcacctagcccgcaaggccctggtggcctccagggtgcctccacctgacacaaccgtccccggcccctgccccgcccccaagctcggatcacatgaattctgcagattcgactagagctcgctgatcagcctcgactgtgccttctagttgccagccatctgttgtttgcccctcccccgtgccttccttgaccctggaaggtgccactcccactgtcctttcctaataaaatgaggaaattgcatcgcattgtctgagtaggtgtcattctattctggggggtggggtggggcaggacagcaagggggaggattgggaagacaatagcaggcatgctggggagagatcgtgcggaccgagcggccgcaggaacccctagtgatggagttggccactccctctctgcgcgctcgctcgctcactgaggccgggcgaccaaaggtcgcccgacgcccgggctttgcccgggcggcctcagtgagcgagcgagcgcgcagctgcctgcaggggcgcctgatgcggtattttctccttacgcatctgtgcggtatttcacaccgcatacgtcaaagcaaccatagtacgcgccctgtagcggcgcattaagcgcggcgggtgtggtggttacgcgcagcgtgaccgctacacttgccagcgccttagcgcccgctcctttcgctttcttcccttcctttctcgccacgttcgccggctttccccgtcaagctctaaatcgggggctccctttagggttccgatttagtgctttacggcacctcgaccccaaaaaacttgatttgggtgatggttcacgtagtgggccatcgccctgatagacggtttttcgccctttgacgttggagtccacgttctttaatagtggactcttgttccaaactggaacaacactcaactctatctcgggctattcttttgatttataagggattttgccgatttcggtctattggttaaaaaatgagctgatttaacaaaaatttaacgcgaattttaacaaaatattaacgtttacaattttatggtgcactctcagtacaatctgctctgatgccgcatagttaagccagccccgacacccgccaacacccgctgacgcgccctgacgggcttgtctgctcccggcatccgcttacagacaagctgtgaccgtctccgggagctgcatgtgtcagaggttttcaccgtcatcaccgaaacgcgcgagacgaaagggcctcgtgatacgcctatttttataggttaatgtcatgacgcggaacccctatttgtttatttttctaaatacattcaaatatgtatccgctcatgagacaataaccctgataaatgcttcaataatattgaaaaaggaagagtatgagccatattcaacgggaaacgtcttgctctaggccgcgattaaattccaacatggatgctgatttatatgggtataaatgggctcgcgataatgtcgggcaatcaggtgcgacaatctatcgattgtatgggaagcccgatgcgccagagttgtttctgaaacatggcaaaggtagcgttgccaatgatgttacagatgagatggtcagactaaactggctgacggaatttatgcctcttccgaccatcaagcattttatccgtactcctgatgatgcatggttactcaccactgcgatccctgggaaaacagcattccaggtattagaagaatatcctgattcaggtgaaaatattgttgatgcgctggcagtgttcctgcgccggttgcattcgattcctgtttgtaattgtccttttaacagcgatcgcgtatttcgtctcgctcaggcgcaatcacgaatgaataacggtttggttgatgcgagtgattttgatgacgagcgtaatggctggcctgttgaacaagtctggaaagaaatgcataaacttttgccattctcaccggattcagtcgtcactcatggtgatttctcacttgataaccttatttttgacgaggggaaattaataggttgtattgatgttggacgagtcggaatcgcagaccgataccaggatcttgccatcctatggaactgcctcggtgagttttctccttcattacagaaacggctttttcaaaaatatggtattgataatcctgatatgaataaattgcagtttcatttgatgctcgatgagtttttctaatcatgaccaaaatcccttaacgtgagttttcgttccactgagcgtcagaccccgtagaaaagatcaaaggatcttcttgagatcctttttttctgcgcgtaatctgctgcttgcaaacaaaaaaaccaccgctaccagcggtggtttgtttgccggatcaagagctaccaactctttttccgaaggtaactggcttcagcagagcgcagataccaaatactgttcttctagtgtagccgtagttaggccaccacttcaagaactctgtagcaccgcctacatacctcgctctgctaatcctgttaccagtggctgctgccagtggcgataagtcgtgtcttaccgggttggactcaagacgatagttaccggataaggcgcagcggtcgggctgaacggggggttcgtgcacacagcccagcttggagcgaacgacctacaccgaactgagatacctacagcgtgagctatgagaaagcgccacgcttcccgaagggagaaaggcggacaggtatccggtaagcggcagggtcggaacaggagagcgcacgagggagcttccagggggaaacgcctggtatctttatagtcctgtcgggtttcgccacctctgacttgagcgtcgatttttgtgatgctcgtcaggggggcggagcctatggaaaaacgccagcaacgcggcctttttacggttcctggccttttgctggccttttgctcacatgtcctgcaggcag

SEQ ID NO: 11101 - DNA, 130 bp, synthetic construct; identical to SEQ ID NO: 10501
  misc_feature 1..130: note = pOB1011, 5'ITR
  source 1..130: mol_type = other DNA

SEQ ID NO: 11102-11104 - skipped (3 entries)

SEQ ID NO: 11105 - DNA, 366 bp, synthetic construct; identical to SEQ ID NO: 9905
  misc_feature 1..366: note = pOB1011, CMV Enhancer
  source 1..366: mol_type = other DNA

SEQ ID NO: 11106 - skipped

SEQ ID NO: 11107 - DNA, 278 bp, synthetic construct; identical to SEQ ID NO: 10
  misc_feature 1..278: note = pOB1011, CBA Promoter
  source 1..278: mol_type = other DNA

SEQ ID NO: 11108 - DNA, 93 bp, synthetic construct; identical to SEQ ID NO: 11
  misc_feature 1..93: note = pOB1011, beta-actin Exon
  source 1..93: mol_type = other DNA

SEQ ID NO: 11109 - DNA, 155 bp, synthetic construct; identical to SEQ ID NO: 9909
  misc_feature 1..155: note = pOB1011, Chimeric Intron
  source 1..155: mol_type = other DNA

SEQ ID NO: 11110 - DNA, 117 bp, synthetic construct; identical to SEQ ID NO: 9910
  misc_feature 1..117: note = pOB1011, hABCD1 5' UTR
  source 1..117: mol_type = other DNA

SEQ ID NO: 11111 - skipped

SEQ ID NO: 11112 - DNA, 2238 bp, synthetic construct; identical to SEQ ID NO: 204
  misc_feature 1..2238: note = pOB1011, hABCD1
  source 1..2238: mol_type = other DNA

SEQ ID NO: 11113 - DNA, 49 bp, synthetic construct; identical to SEQ ID NO: 9913
  misc_feature 1..49: note = pOB1011, hABCD1 3' UTR
  source 1..49: mol_type = other DNA

SEQ ID NO: 11114-11115 - skipped (2 entries)

SEQ ID NO: 11116 - DNA, 208 bp, synthetic construct; identical to SEQ ID NO: 9916
  misc_feature 1..208: note = pOB1011, bGH pA
  source 1..208: mol_type = other DNA

SEQ ID NO: 11117 - skipped

SEQ ID NO: 11118 - DNA, 130 bp, synthetic construct; identical to SEQ ID NO: 10518
  misc_feature 1..130: note = pOB1011, 3'ITR
  source 1..130: mol_type = other DNA

SEQ ID NO: 11119-11149 - skipped (31 entries)

SEQ ID NO: 11150 - DNA, 3920 bp, synthetic construct
  misc_feature 1..3920: note = pOB1011, ITR-ITR
  source 1..3920: mol_type = other DNA
ctgcgcgctcgctcgctcactgaggccgcccgggcaaagcccgggcgtcgggcgacctttggtcgcccggcctcagtgagcgagcgagcgcgcagagagggagtggccaactccatcactaggggttcctgcggccgcaaccgtctagttattaatagtaatcaattacggggtcattagttcatagcccatatatggagttccgcgttacataacttacggtaaatggcccgcctggctgaccgcccaacgacccccgcccattgacgtcaataatgacgtatgttcccatagtaacgccaatagggactttccattgacgtcaatgggtggagtatttacggtaaactgcccacttggcagtacatcaagtgtatcatatgccaagtacgccccctattgacgtcaatgacggtaaatggcccgcctggcattatgcccagtacatgaccttatgggactttcctacttggcagtacatctacgtattagtcatcgctattaccatggtcgaggtgagccccacgttctgcttcactctccccatctcccccccctccccacccccaattttgtatttatttattttttaattattttgtgcagcgatgggggcggggggggggggggggcgcgcgccaggcggggcggggcggggcgaggggcggggcggggcgaggcggagaggtgcggcggcagccaatcagagcggcgcgctccgaaagtttccttttatggcgaggcggcggcggcggcggccctataaaaagcgaagcgcgcggcgggcgggagtcgctgcgcgctgccttcgccccgtgccccgctccgccgccgcctcgcgccgcccgccccggctctgactgaccgcgttactcccacaggtgagcgggcgggacggcccttctcctccgggctgtaattagcgcttggtttaatgacggcttgtttcttttctgtggctgcgtgaaagccttgaggggctccgggagctagagcctctgctaaccatgttcatgccttcttctttttcctacagctcctgggcaacgtgctggttattgtgctgtctcatcattttggcaaagaattcctcgaagatccgaaggggttcaagctttccagttgcctagacaacaggcccagggtcagagcaacaatccttccagccacctgcctcaactgctgccccaggcaccagccccagtccctacgcggcagccagcccaggtgacatgccggtgctctccaggccccggccctggcgggggaacacgctgaagcgcacggccgtgctcctggccctcgcggcctatggagcccacaaagtctaccccttggtgcgccagtgcctggccccggccaggggtcttcaggcgcccgccggggagcccacgcaggaggcctccggggtcgcggcggccaaagctggcatgaaccgggtattcctgcagcggctcctgtggctcctgcggctgctgttcccccgggtcctgtgccgggagacggggctgctggccctgcactcggccgccttggtgagccgcaccttcctgtcggtgtatgtggcccgcctggacggaaggctggcccgctgcatcgtccgcaaggacccgcgggcttttggctggcagctgctgcagtggctcctcatcgccctccctgctaccttcgtcaacagtgccatccgttacctggagggccaactggccctgtcgttccgcagccgtctggtggcccacgcctaccgcctctacttctcccagcagacctactaccgggtcagcaacatggacgggcggcttcgcaaccctgaccagtctctgacggaggacgtggtggcctttgcggcctctgtggcccacctctactccaacctgaccaagccactcctggacgtggctgtgacttcctacaccctgcttcgggcggcccgctcccgtggagccggcacagcctggccctcggccatcgccggcctcgtggtgttcctcacggccaacgtgctgcgggccttctcgcccaagttcggggagctggtggcagaggaggcgcggcggaagggggagctgcgctacatgcactcgcgtgtggtggccaactcggaggagatcgccttctatgggggccatgaggtggagctggccctgctacagcgctcctaccaggacctggcctcgcagatcaacctcatccttctggaacgcctgtggtatgttatgctggagcagttcctcatgaagtatgtgtggagcgcctcgggcctgctcatggtggctgtccccatcatcactgccactggctactcagagtcagatgcagaggccgtgaagaaggcagccttggaaaagaaggaggaggagctggtgagcgagcgcacagaagccttcactattgcccgcaacctcctgacagcggctgcagatgccattgagcggatcatgtcgtcgtacaaggaggtgacggagctggctggctacacagcccgggtgcacgagatgttccaggtatttgaagatgttcagcgctgtcacttcaagaggcccagggagctagaggacgctcaggcggggtctgggaccataggccggtctggtgtccgtgtggagggccccctgaagatccgaggccaggtggtggatgtggaacaggggatcatctgcgagaacatccccatcgtcacgccctcaggagaggtggtggtggccagcctcaacatcagggtggaggaaggcatgcatctgctcatcacaggccccaatggctgcggcaagagctccctgttccggatcctgggtgggctctggcccacgtacggtggtgtgctctacaagcccccaccccagcgcatgttctacatcccgcagaggccctacatgtctgtgggctccctgcgtgaccaggtgatctacccggactcagtggaggacatgcaaaggaagggctactcggagcaggacctggaagccatcctggacgtcgtgcacctgcaccacatcctgcagcgggagggaggttgggaggctatgtgtgactggaaggacgtcctgtcgggtggcgagaagcagagaatcggcatggcccgcatgttctaccacaggcccaagtacgccctcctggatgaatgcaccagcgccgtgagcatcgacgtggaaggcaagatcttccaggcggccaaggacgcgggcattgccctgctctccatcacccaccggccctccctgtggaaataccacacacacttgctacagttcgatggggagggcggctggaagttcgagaagctggactcagctgcccgcctgagcctgacggaggagaagcagcggctggagcagcagctggcgggcattcccaagatgcagcggcgcctccaggagctctgccagatcctgggcgaggccgtggccccagcgcatgtgccggcacctagcccgcaaggccctggtggcctccagggtgcctccacctgacacaaccgtccccggcccctgccccgcccccaagctcggatcacatgaattctgcagattcgactagagctcgctgatcagcctcgactgtgccttctagttgccagccatctgttgtttgcccctcccccgtgccttccttgaccctggaaggtgccactcccactgtcctttcctaataaaatgaggaaattgcatcgcattgtctgagtaggtgtcattctattctggggggtggggtggggcaggacagcaagggggaggattgggaagacaatagcaggcatgctggggagagatcgtgcggaccgagcggccgcaggaacccctagtgatggagttggccactccctctctgcgcgctcgctcgctcactgaggccgggcgaccaaaggtcgcccgacgcccgggctttgcccgggcggcctcagtgagcgagcgagcgcgcag

SEQ ID NO: 11151-11159 - skipped (9 entries)

SEQ ID NO: 11160 - DNA, 3948 bp, synthetic construct
  misc_feature 1..3948: note = pOB1011, rAAV vector genome
  source 1..3948: mol_type = other DNA
tggccactccctctctgcgcgctcgctcgctcactgaggccgcccgggcaaagcccgggcgtcgggcgacctttggtcgcccggcctcagtgagcgagcgagcgcgcagagagggagtggccaactccatcactaggggttcctgcggccgcaaccgtctagttattaatagtaatcaattacggggtcattagttcatagcccatatatggagttccgcgttacataacttacggtaaatggcccgcctggctgaccgcccaacgacccccgcccattgacgtcaataatgacgtatgttcccatagtaacgccaatagggactttccattgacgtcaatgggtggagtatttacggtaaactgcccacttggcagtacatcaagtgtatcatatgccaagtacgccccctattgacgtcaatgacggtaaatggcccgcctggcattatgcccagtacatgaccttatgggactttcctacttggcagtacatctacgtattagtcatcgctattaccatggtcgaggtgagccccacgttctgcttcactctccccatctcccccccctccccacccccaattttgtatttatttattttttaattattttgtgcagcgatgggggcggggggggggggggggcgcgcgccaggcggggcggggcggggcgaggggcggggcggggcgaggcggagaggtgcggcggcagccaatcagagcggcgcgctccgaaagtttccttttatggcgaggcggcggcggcggcggccctataaaaagcgaagcgcgcggcgggcgggagtcgctgcgcgctgccttcgccccgtgccccgctccgccgccgcctcgcgccgcccgccccggctctgactgaccgcgttactcccacaggtgagcgggcgggacggcccttctcctccgggctgtaattagcgcttggtttaatgacggcttgtttcttttctgtggctgcgtgaaagccttgaggggctccgggagctagagcctctgctaaccatgttcatgccttcttctttttcctacagctcctgggcaacgtgctggttattgtgctgtctcatcattttggcaaagaattcctcgaagatccgaaggggttcaagctttccagttgcctagacaacaggcccagggtcagagcaacaatccttccagccacctgcctcaactgctgccccaggcaccagccccagtccctacgcggcagccagcccaggtgacatgccggtgctctccaggccccggccctggcgggggaacacgctgaagcgcacggccgtgctcctggccctcgcggcctatggagcccacaaagtctaccccttggtgcgccagtgcctggccccggccaggggtcttcaggcgcccgccggggagcccacgcaggaggcctccggggtcgcggcggccaaagctggcatgaaccgggtattcctgcagcggctcctgtggctcctgcggctgctgttcccccgggtcctgtgccgggagacggggctgctggccctgcactcggccgccttggtgagccgcaccttcctgtcggtgtatgtggcccgcctggacggaaggctggcccgctgcatcgtccgcaaggacccgcgggcttttggctggcagctgctgcagtggctcctcatcgccctccctgctaccttcgtcaacagtgccatccgttacctggagggccaactggccctgtcgttccgcagccgtctggtggcccacgcctaccgcctctacttctcccagcagacctactaccgggtcagcaacatggacgggcggcttcgcaaccctgaccagtctctgacggaggacgtggtggcctttgcggcctctgtggcccacctctactccaacctgaccaagccactcctggacgtggctgtgacttcctacaccctgcttcgggcggcccgctcccgtggagccggcacagcctggccctcggccatcgccggcctcgtggtgttcctcacggccaacgtgctgcgggccttctcgcccaagttcggggagctggtggcagaggaggcgcggcggaagggggagctgcgctacatgcactcgcgtgtggtggccaactcggaggagatcgccttctatgggggccatgaggtggagctggccctgctacagcgctcctaccaggacctggcctcgcagatcaacctcatccttctggaacgcctgtggtatgttatgctggagcagttcctcatgaagtatgtgtggagcgcctcgggcctgctcatggtggctgtccccatcatcactgccactggctactcagagtcagatgcagaggccgtgaagaaggcagccttggaaaagaaggaggaggagctggtgagcgagcgcacagaagccttcactattgcccgcaacctcctgacagcggctgcagatgccattgagcggatcatgtcgtcgtacaaggaggtgacggagctggctggctacacagcccgggtgcacgagatgttccaggtatttgaagatgttcagcgctgtcacttcaagaggcccagggagctagaggacgctcaggcggggtctgggaccataggccggtctggtgtccgtgtggagggccccctgaagatccgaggccaggtggtggatgtggaacaggggatcatctgcgagaacatccccatcgtcacgccctcaggagaggtggtggtggccagcctcaacatcagggtggaggaaggcatgcatctgctcatcacaggccccaatggctgcggcaagagctccctgttccggatcctgggtgggctctggcccacgtacggtggtgtgctctacaagcccccaccccagcgcatgttctacatcccgcagaggccctacatgtctgtgggctccctgcgtgaccaggtgatctacccggactcagtggaggacatgcaaaggaagggctactcggagcaggacctggaagccatcctggacgtcgtgcacctgcaccacatcctgcagcgggagggaggttgggaggctatgtgtgactggaaggacgtcctgtcgggtggcgagaagcagagaatcggcatggcccgcatgttctaccacaggcccaagtacgccctcctggatgaatgcaccagcgccgtgagcatcgacgtggaaggcaagatcttccaggcggccaaggacgcgggcattgccctgctctccatcacccaccggccctccctgtggaaataccacacacacttgctacagttcgatggggagggcggctggaagttcgagaagctggactcagctgcccgcctgagcctgacggaggagaagcagcggctggagcagcagctggcgggcattcccaagatgcagcggcgcctccaggagctctgccagatcctgggcgaggccgtggccccagcgcatgtgccggcacctagcccgcaaggccctggtggcctccagggtgcctccacctgacacaaccgtccccggcccctgccccgcccccaagctcggatcacatgaattctgcagattcgactagagctcgctgatcagcctcgactgtgccttctagttgccagccatctgttgtttgcccctcccccgtgccttccttgaccctggaaggtgccactcccactgtcctttcctaataaaatgaggaaattgcatcgcattgtctgagtaggtgtcattctattctggggggtggggtggggcaggacagcaagggggaggattgggaagacaatagcaggcatgctggggagagatcgtgcggaccgagcggccgcaggaacccctagtgatggagttggccactccctctctgcgcgctcgctcgctcactgaggccgggcgaccaaaggtcgcccgacgcccgggctttgcccgggcggcctcagtgagcgagcgagcgcgcagagagggagtggcca

SEQ ID NO: 11161-11184 - skipped (24 entries)

SEQ ID NO: 11185 - DNA, 54 bp, synthetic construct; identical to SEQ ID NO: 9985
  misc_feature 1..54: note = pOB1011, Rabbit beta-globin exon
  source 1..54: mol_type = other DNA

SEQ ID NO: 11186-11199 - skipped (14 entries)

SEQ ID NO: 11200 - DNA, 6429 bp, synthetic construct
  misc_feature 1..6429: note = pOB1012, full plasmid
  source 1..6429: mol_type = other DNA
ctgcgcgctcgctcgctcactgaggccgcccgggcaaagcccgggcgtcgggcgacctttggtcgcccggcctcagtgagcgagcgagcgcgcagagagggagtggccaactccatcactaggggttcctgcggccgcaaccgtctagttattaatagtaatcaattacggggtcattagttcatagcccatatatggagttccgcgttacataacttacggtaaatggcccgcctggctgaccgcccaacgacccccgcccattgacgtcaataatgacgtatgttcccatagtaacgccaatagggactttccattgacgtcaatgggtggagtatttacggtaaactgcccacttggcagtacatcaagtgtatcatatgccaagtacgccccctattgacgtcaatgacggtaaatggcccgcctggcattatgcccagtacatgaccttatgggactttcctacttggcagtacatctacgtattagtcatcgctattaccatggtcgaggtgagccccacgttctgcttcactctccccatctcccccccctccccacccccaattttgtatttatttattttttaattattttgtgcagcgatgggggcggggggggggggggggcgcgcgccaggcggggcggggcggggcgaggggcggggcggggcgaggcggagaggtgcggcggcagccaatcagagcggcgcgctccgaaagtttccttttatggcgaggcggcggcggcggcggccctataaaaagcgaagcgcgcggcgggcgggagtcgctgcgcgctgccttcgccccgtgccccgctccgccgccgcctcgcgccgcccgccccggctctgactgaccgcgttactcccacaggtgagcgggcgggacggcccttctcctccgggctgtaattagcgcttggtttaatgacggcttgtttcttttctgtggctgcgtgaaagccttgaggggctccgggagctagagcctctgctaaccatgttcatgccttcttctttttcctacagctcctgggcaacgtgctggttattgtgctgtctcatcattttggcaaagaattcctcgaagatccgaaggggttcaagctcgcgtattgggatagcttccaccatgccggtgctctctaggccccggccctggcgggggaacacgctgaagcgcacggccgtgctcctggccctcgcggcctatggagcccacaaagtctaccccttggtgcgccagtgcctggccccggctaggggtcttcaggcgcccgccggggagcccacgcaggaggcctccggggtcgcggcggccaaagctggcatgaaccgggtattcctgcagcggctcctctggctcctgcggctgctgttcccccgggtcctctgccgggagacggggctgctggccctgcactcggccgccttggtgagccgcaccttcctgtcggtgtacgtggcccgcctggacggaaggctggcccgctgcatcgtccgcaaggacccgcgggcttttggctggcagctgctgcagtggctcctcatcgccctccctgctaccttcgtcaacagtgccatccgttacctggagggccaactggccctgtcgttccgcagccgtctggtggcccacgcctaccgcctctacttctcccagcagacctactaccgggtcagcaacatggacgggcggcttcgcaaccctgaccagtctctgacggaggacgtggtggcctttgcggcctctgtggcccacctctactccaacctgaccaagccactcctggacgtggctgtgacttcctacaccctgcttcgggcggcccgctcccgcggagccggcacagcctggccctcggccatcgccggcctcgtggtgttcctcacggccaacgtgctgcgggccttctcgcccaagttcggggagctggtggcagaggaggcgcggcggaagggggagctgcgctacatgcactcgcgtgtggtggccaactcggaggagatcgccttctatgggggccatgaggtggagctggccctgctacagcgctcctaccaggacctggcctcgcagatcaacctcatccttctggaacgcctctggtatgttatgctggagcagttcctcatgaagtatgtgtggagcgcctcgggcctgctcatggtggctgtccccatcatcactgccactggctactcagagtcagatgcagaggccgtgaagaaggcagccttggaaaagaaggaggaggagctggtgagcgagcgcacagaagccttcactattgcccgcaacctcctgacagcggctgcagatgccattgagcggatcatgtcgtcgtacaaggaggtgacggagctggctggctacacagcccgggtgcacgagatgttccaggtatttgaagatgttcagcgctgtcacttcaagaggcccagggagctagaggacgctcaggcggggtctgggaccataggccggtctggtgtccgtgtggagggccccctgaagatccgaggccaggtggtggacgtggaacaggggatcatctgcgagaacatccccatcgtcacgccctcaggagaggtggtggtggccagcctcaacatcagggtggaggaaggcatgcatctgctcatcacaggccccaatggctgcggcaagagctccctgttccggatcctgggtgggctctggcccacgtacggtggtgtgctctacaagcccccaccccagcgcatgttctacatcccgcagaggccctacatgtctgtgggctccctgcgtgaccaggtgatctacccggactcagtggaggacatgcaaaggaagggctactcggagcaggacctggaagccatcctggacgtcgtgcacctgcaccacatcctgcagcgggagggaggttgggaggctatgtgtgactggaaggacgtcctgtcgggtggcgagaagcagagaatcggcatggcccgcatgttctaccacaggcccaagtacgccctcctggatgaatgcaccagcgccgttagcatcgacgtggaaggcaagatcttccaggcggccaaggacgcgggcattgccctgctctccatcacccaccggccctccctgtggaaataccacacacacttgctacagttcgatggggagggcggctggaagttcgagaagctggactcagctgcccgcctgagcctgacggaggagaagcagcggctggagcagcagctggcgggcattcccaagatgcagcggcgcctccaggagctctgccagatcctgggcgaggccgtggccccagcgcatgtgccggcacctagcccgcaaggccctggtggcctccagggtgcctccacctgataactcgagctagcggccgctctagaaagagatccagacatgataagatacattgatgagtttggacaaaccacaactagaatgcagtgaaaaaaatgctttatttgtgaaatttgtgatgctattgctttatttgtaaccattataagctgcaataaacaagttaacaacaacaattgcattcattttatgtttcaggttcagggggaggtgtgggaggttttttagtcgactagagctcgctgatcagcctcgactgtgccttctagttgccagccatctgttgtttgcccctcccccgtgccttccttgaccctggaaggtgccactcccactgtcctttcctaataaaatgaggaaattgcatcgcattgtctgagtaggtgtcattctattctggggggtggggtggggcaggacagcaagggggaggattgggaagacaatagcaggcatgctggggagagatcgtgcggaccgagcggccgcaggaacccctagtgatggagttggccactccctctctgcgcgctcgctcgctcactgaggccgggcgaccaaaggtcgcccgacgcccgggctttgcccgggcggcctcagtgagcgagcgagcgcgcagctgcctgcaggggcgcctgatgcggtattttctccttacgcatctgtgcggtatttcacaccgcatacgtcaaagcaaccatagtacgcgccctgtagcggcgcattaagcgcggcgggtgtggtggttacgcgcagcgtgaccgctacacttgccagcgccttagcgcccgctcctttcgctttcttcccttcctttctcgccacgttcgccggctttccccgtcaagctctaaatcgggggctccctttagggttccgatttagtgctttacggcacctcgaccccaaaaaacttgatttgggtgatggttcacgtagtgggccatcgccctgatagacggtttttcgccctttgacgttggagtccacgttctttaatagtggactcttgttccaaactggaacaacactcaactctatctcgggctattcttttgatttataagggattttgccgatttcggtctattggttaaaaaatgagctgatttaacaaaaatttaacgcgaattttaacaaaatattaacgtttacaattttatggtgcactctcagtacaatctgctctgatgccgcatagttaagccagccccgacacccgccaacacccgctgacgcgccctgacgggcttgtctgctcccggcatccgcttacagacaagctgtgaccgtctccgggagctgcatgtgtcagaggttttcaccgtcatcaccgaaacgcgcgagacgaaagggcctcgtgatacgcctatttttataggttaatgtcatgacgcggaacccctatttgtttatttttctaaatacattcaaatatgtatccgctcatgagacaataaccctgataaatgcttcaataatattgaaaaaggaagagtatgagccatattcaacgggaaacgtcttgctctaggccgcgattaaattccaacatggatgctgatttatatgggtataaatgggctcgcgataatgtcgggcaatcaggtgcgacaatctatcgattgtatgggaagcccgatgcgccagagttgtttctgaaacatggcaaaggtagcgttgccaatgatgttacagatgagatggtcagactaaactggctgacggaatttatgcctcttccgaccatcaagcattttatccgtactcctgatgatgcatggttactcaccactgcgatccctgggaaaacagcattccaggtattagaagaatatcctgattcaggtgaaaatattgttgatgcgctggcagtgttcctgcgccggttgcattcgattcctgtttgtaattgtccttttaacagcgatcgcgtatttcgtctcgctcaggcgcaatcacgaatgaataacggtttggttgatgcgagtgattttgatgacgagcgtaatggctggcctgttgaacaagtctggaaagaaatgcataaacttttgccattctcaccggattcagtcgtcactcatggtgatttctcacttgataaccttatttttgacgaggggaaattaataggttgtattgatgttggacgagtcggaatcgcagaccgataccaggatcttgccatcctatggaactgcctcggtgagttttctccttcattacagaaacggctttttcaaaaatatggtattgataatcctgatatgaataaattgcagtttcatttgatgctcgatgagtttttctaatcatgaccaaaatcccttaacgtgagttttcgttccactgagcgtcagaccccgtagaaaagatcaaaggatcttcttgagatcctttttttctgcgcgtaatctgctgcttgcaaacaaaaaaaccaccgctaccagcggtggtttgtttgccggatcaagagctaccaactctttttccgaaggtaactggcttcagcagagcgcagataccaaatactgttcttctagtgtagccgtagttaggccaccacttcaagaactctgtagcaccgcctacatacctcgctctgctaatcctgttaccagtggctgctgccagtggcgataagtcgtgtcttaccgggttggactcaagacgatagttaccggataaggcgcagcggtcgggctgaacggggggttcgtgcacacagcccagcttggagcgaacgacctacaccgaactgagatacctacagcgtgagctatgagaaagcgccacgcttcccgaagggagaaaggcggacaggtatccggtaagcggcagggtcggaacaggagagcgcacgagggagcttccagggggaaacgcctggtatctttatagtcctgtcgggtttcgccacctctgacttgagcgtcgatttttgtgatgctcgtcaggggggcggagcctatggaaaaacgccagcaacgcggcctttttacggttcctggccttttgctggccttttgctcacatgtcctgcaggcag

SEQ ID NO: 11201 - DNA, 130 bp, synthetic construct; identical to SEQ ID NO: 10501
  misc_feature 1..130: note = pOB1012, 5'ITR
  source 1..130: mol_type = other DNA

SEQ ID NO: 11202-11204 - skipped (3 entries)

SEQ ID NO: 11205 - DNA, 366 bp, synthetic construct; identical to SEQ ID NO: 9905
  misc_feature 1..366: note = pOB1012, CMV Enhancer
  source 1..366: mol_type = other DNA

SEQ ID NO: 11206 - skipped

SEQ ID NO: 11207 - DNA, 278 bp, synthetic construct; identical to SEQ ID NO: 10
  misc_feature 1..278: note = pOB1012, CBA Promoter
  source 1..278: mol_type = other DNA

SEQ ID NO: 11208 - DNA, 93 bp, synthetic construct; identical to SEQ ID NO: 11
  misc_feature 1..93: note = pOB1012, beta-actin Exon
  source 1..93: mol_type = other DNA

SEQ ID NO: 11209 - DNA, 155 bp, synthetic construct; identical to SEQ ID NO: 9909
  misc_feature 1..155: note = pOB1012, Chimeric Intron
  source 1..155: mol_type = other DNA

SEQ ID NO: 11210 - skipped

SEQ ID NO: 11211 - DNA, 10 bp, synthetic construct
  misc_feature 1..10: note = pOB1012, Kozak Sequence
  source 1..10: mol_type = other DNA
tccaccatgc

SEQ ID NO: 11212 - DNA, 2241 bp, synthetic construct; identical to SEQ ID NO: 10512
  misc_feature 1..2241: note = pOB1012, hABCD1/9nt
  source 1..2241: mol_type = other DNA

SEQ ID NO: 11213 - skipped

SEQ ID NO: 11214 - DNA, 197 bp, synthetic construct; identical to SEQ ID NO: 9914
  misc_feature 1..197: note = pOB1012, SV40 pA
  source 1..197: mol_type = other DNA

SEQ ID NO: 11215 - skipped

SEQ ID NO: 11216 - DNA, 208 bp, synthetic construct; identical to SEQ ID NO: 9916
  misc_feature 1..208: note = pOB1012, bGH pA
  source 1..208: mol_type = other DNA

SEQ ID NO: 11217 - skipped

SEQ ID NO: 11218 - DNA, 130 bp, synthetic construct; identical to SEQ ID NO: 10518
  misc_feature 1..130: note = pOB1012, 3'ITR
  source 1..130: mol_type = other DNA

SEQ ID NO: 11219-11234 - skipped (16 entries)

SEQ ID NO: 11235 - DNA, 434 bp, synthetic construct; identical to SEQ ID NO: 206
  misc_feature 1..434: note = pOB1012, Total polyA
  source 1..434: mol_type = other DNA

SEQ ID NO: 11236-11249 - skipped (14 entries)

SEQ ID NO: 11250 - DNA, 3996 bp, synthetic construct
  misc_feature 1..3996: note = pOB1012, ITR-ITR
  source 1..3996: mol_type = other DNA
ctgcgcgctcgctcgctcactgaggccgcccgggcaaagcccgggcgtcgggcgacctttggtcgcccggcctcagtgagcgagcgagcgcgcagagagggagtggccaactccatcactaggggttcctgcggccgcaaccgtctagttattaatagtaatcaattacggggtcattagttcatagcccatatatggagttccgcgttacataacttacggtaaatggcccgcctggctgaccgcccaacgacccccgcccattgacgtcaataatgacgtatgttcccatagtaacgccaatagggactttccattgacgtcaatgggtggagtatttacggtaaactgcccacttggcagtacatcaagtgtatcatatgccaagtacgccccctattgacgtcaatgacggtaaatggcccgcctggcattatgcccagtacatgaccttatgggactttcctacttggcagtacatctacgtattagtcatcgctattaccatggtcgaggtgagccccacgttctgcttcactctccccatctcccccccctccccacccccaattttgtatttatttattttttaattattttgtgcagcgatgggggcggggggggggggggggcgcgcgccaggcggggcggggcggggcgaggggcggggcggggcgaggcggagaggtgcggcggcagccaatcagagcggcgcgctccgaaagtttccttttatggcgaggcggcggcggcggcggccctataaaaagcgaagcgcgcggcgggcgggagtcgctgcgcgctgccttcgccccgtgccccgctccgccgccgcctcgcgccgcccgccccggctctgactgaccgcgttactcccacaggtgagcgggcgggacggcccttctcctccgggctgtaattagcgcttggtttaatgacggcttgtttcttttctgtggctgcgtgaaagccttgaggggctccgggagctagagcctctgctaaccatgttcatgccttcttctttttcctacagctcctgggcaacgtgctggttattgtgctgtctcatcattttggcaaagaattcctcgaagatccgaaggggttcaagctcgcgtattgggatagcttccaccatgccggtgctctctaggccccggccctggcgggggaacacgctgaagcgcacggccgtgctcctggccctcgcggcctatggagcccacaaagtctaccccttggtgcgccagtgcctggccccggctaggggtcttcaggcgcccgccggggagcccacgcaggaggcctccggggtcgcggcggccaaagctggcatgaaccgggtattcctgcagcggctcctctggctcctgcggctgctgttcccccgggtcctctgccgggagacggggctgctggccctgcactcggccgccttggtgagccgcaccttcctgtcggtgtacgtggcccgcctggacggaaggctggcccgctgcatcgtccgcaaggacccgcgggcttttggctggcagctgctgcagtggctcctcatcgccctccctgctaccttcgtcaacagtgccatccgttacctggagggccaactggccctgtcgttccgcagccgtctggtggcccacgcctaccgcctctacttctcccagcagacctactaccgggtcagcaacatggacgggcggcttcgcaaccctgaccagtctctgacggaggacgtggtggcctttgcggcctctgtggcccacctctactccaacctgaccaagccactcctggacgtggctgtgacttcctacaccctgcttcgggcggcccgctcccgcggagccggcacagcctggccctcggccatcgccggcctcgtggtgttcctcacggccaacgtgctgcgggccttctcgcccaagttcggggagctggtggcagaggaggcgcggcggaagggggagctgcgctacatgcactcgcgtgtggtggccaactcggaggagatcgccttctatgggggccatgaggtggagctggccctgctacagcgctcctaccaggacctggcctcgcagatcaacctcatccttctggaacgcctctggtatgttatgctggagcagttcctcatgaagtatgtgtggagcgcctcgggcctgctcatggtggctgtccccatcatcactgccactggctactcagagtcagatgcagaggccgtgaagaaggcagccttggaaaagaaggaggaggagctggtgagcgagcgcacagaagccttcactattgcccgcaacctcctgacagcggctgcagatgccattgagcggatcatgtcgtcgtacaaggaggtgacggagctggctggctacacagcccgggtgcacgagatgttccaggtatttgaagatgttcagcgctgtcacttcaagaggcccagggagctagaggacgctcaggcggggtctgggaccataggccggtctggtgtccgtgtggagggccccctgaagatccgaggccaggtggtggacgtggaacaggggatcatctgcgagaacatccccatcgtcacgccctcaggagaggtggtggtggccagcctcaacatcagggtggaggaaggcatgcatctgctcatcacaggccccaatggctgcggcaagagctccctgttccggatcctgggtgggctctggcccacgtacggtggtgtgctctacaagcccccaccccagcgcatgttctacatcccgcagaggccctacatgtctgtgggctccctgcgtgaccaggtgatctacccggactcagtggaggacatgcaaaggaagggctactcggagcaggacctggaagccatcctggacgtcgtgcacctgcaccacatcctgcagcgggagggaggttgggaggctatgtgtgactggaaggacgtcctgtcgggtggcgagaagcagagaatcggcatggcccgcatgttctaccacaggcccaagtacgccctcctggatgaatgcaccagcgccgttagcatcgacgtggaaggcaagatcttccaggcggccaaggacgcgggcattgccctgctctccatcacccaccggccctccctgtggaaataccacacacacttgctacagttcgatggggagggcggctggaagttcgagaagctggactcagctgcccgcctgagcctgacggaggagaagcagcggctggagcagcagctggcgggcattcccaagatgcagcggcgcctccaggagctctgccagatcctgggcgaggccgtggccccagcgcatgtgccggcacctagcccgcaaggccctggtggcctccagggtgcctccacctgataactcgagctagcggccgctctagaaagagatccagacatgataagatacattgatgagtttggacaaaccacaactagaatgcagtgaaaaaaatgctttatttgtgaaatttgtgatgctattgctttatttgtaaccattataagctgcaataaacaagttaacaacaacaattgcattcattttatgtttcaggttcagggggaggtgtgggaggttttttagtcgactagagctcgctgatcagcctcgactgtgccttctagttgccagccatctgttgtttgcccctcccccgtgccttccttgaccctggaaggtgccactcccactgtcctttcctaataaaatgaggaaattgcatcgcattgtctgagtaggtgtcattctattctggggggtggggtggggcaggacagcaagggggaggattgggaagacaatagcaggcatgctggggagagatcgtgcggaccgagcggccgcaggaacccctagtgatggagttggccactccctctctgcgcgctcgctcgctcactgaggccgggcgaccaaaggtcgcccgacgcccgggctttgcccgggcggcctcagtgagcgagcgagcgcgcag

SEQ ID NO: 11251-11259 - skipped (9 entries)

SEQ ID NO: 11260 - DNA, 4024 bp, synthetic construct
  misc_feature 1..4024: note = pOB1012, rAAV vector genome
  source 1..4024: mol_type = other DNA
tggccactccctctctgcgcgctcgctcgctcactgaggccgcccgggcaaagcccgggcgtcgggcgacctttggtcgcccggcctcagtgagcgagcgagcgcgcagagagggagtggccaactccatcactaggggttcctgcggccgcaaccgtctagttattaatagtaatcaattacggggtcattagttcatagcccatatatggagttccgcgttacataacttacggtaaatggcccgcctggctgaccgcccaacgacccccgcccattgacgtcaataatgacgtatgttcccatagtaacgccaatagggactttccattgacgtcaatgggtggagtatttacggtaaactgcccacttggcagtacatcaagtgtatcatatgccaagtacgccccctattgacgtcaatgacggtaaatggcccgcctggcattatgcccagtacatgaccttatgggactttcctacttggcagtacatctacgtattagtcatcgctattaccatggtcgaggtgagccccacgttctgcttcactctccccatctcccccccctccccacccccaattttgtatttatttattttttaattattttgtgcagcgatgggggcggggggggggggggggcgcgcgccaggcggggcggggcggggcgaggggcggggcggggcgaggcggagaggtgcggcggcagccaatcagagcggcgcgctccgaaagtttccttttatggcgaggcggcggcggcggcggccctataaaaagcgaagcgcgcggcgggcgggagtcgctgcgcgctgccttcgccccgtgccccgctccgccgccgcctcgcgccgcccgccccggctctgactgaccgcgttactcccacaggtgagcgggcgggacggcccttctcctccgggctgtaattagcgcttggtttaatgacggcttgtttcttttctgtggctgcgtgaaagccttgaggggctccgggagctagagcctctgctaaccatgttcatgccttcttctttttcctacagctcctgggcaacgtgctggttattgtgctgtctcatcattttggcaaagaattcctcgaagatccgaaggggttcaagctcgcgtattgggatagcttccaccatgccggtgctctctaggccccggccctggcgggggaacacgctgaagcgcacggccgtgctcctggccctcgcggcctatggagcccacaaagtctaccccttggtgcgccagtgcctggccccggctaggggtcttcaggcgcccgccggggagcccacgcaggaggcctccggggtcgcggcggccaaagctggcatgaaccgggtattcctgcagcggctcctctggctcctgcggctgctgttcccccgggtcctctgccgggagacggggctgctggccctgcactcggccgccttggtgagccgcaccttcctgtcggtgtacgtggcccgcctggacggaaggctggcccgctgcatcgtccgcaaggacccgcgggcttttggctggcagctgctgcagtggctcctcatcgccctccctgctaccttcgtcaacagtgccatccgttacctggagggccaactggccctgtcgttccgcagccgtctggtggcccacgcctaccgcctctacttctcccagcagacctactaccgggtcagcaacatggacgggcggcttcgcaaccctgaccagtctctgacggaggacgtggtggcctttgcggcctctgtggcccacctctactccaacctgaccaagccactcctggacgtggctgtgacttcctacaccctgcttcgggcggcccgctcccgcggagccggcacagcctggccctcggccatcgccggcctcgtggtgttcctcacggccaacgtgctgcgggccttctcgcccaagttcggggagctggtggcagaggaggcgcggcggaagggggagctgcgctacatgcactcgcgtgtggtggccaactcggaggagatcgccttctatgggggccatgaggtggagctggccctgctacagcgctcctaccaggacctggcctcgcagatcaacctcatccttctggaacgcctctggtatgttatgctggagcagttcctcatgaagtatgtgtggagcgcctcgggcctgctcatggtggctgtccccatcatcactgccactggctactcagagtcagatgcagaggccgtgaagaaggcagccttggaaaagaaggaggaggagctggtgagcgagcgcacagaagccttcactattgcccgcaacctcctgacagcggctgcagatgccattgagcggatcatgtcgtcgtacaaggaggtgacggagctggctggctacacagcccgggtgcacgagatgttccaggtatttgaagatgttcagcgctgtcacttcaagaggcccagggagctagaggacgctcaggcggggtctgggaccataggccggtctggtgtccgtgtggagggccccctgaagatccgaggccaggtggtggacgtggaacaggggatcatctgcgagaacatccccatcgtcacgccctcaggagaggtggtggtggccagcctcaacatcagggtggaggaaggcatgcatctgctcatcacaggccccaatggctgcggcaagagctccctgttccggatcctgggtgggctctggcccacgtacggtggtgtgctctacaagcccccaccccagcgcatgttctacatcccgcagaggccctacatgtctgtgggctccctgcgtgaccaggtgatctacccggactcagtggaggacatgcaaaggaagggctactcggagcaggacctggaagccatcctggacgtcgtgcacctgcaccacatcctgcagcgggagggaggttgggaggctatgtgtgactggaaggacgtcctgtcgggtggcgagaagcagagaatcggcatggcccgcatgttctaccacaggcccaagtacgccctcctggatgaatgcaccagcgccgttagcatcgacgtggaaggcaagatcttccaggcggccaaggacgcgggcattgccctgctctccatcacccaccggccctccctgtggaaataccacacacacttgctacagttcgatggggagggcggctggaagttcgagaagctggactcagctgcccgcctgagcctgacggaggagaagcagcggctggagcagcagctggcgggcattcccaagatgcagcggcgcctccaggagctctgccagatcctgggcgaggccgtggccccagcgcatgtgccggcacctagcccgcaaggccctggtggcctccagggtgcctccacctgataactcgagctagcggccgctctagaaagagatccagacatgataagatacattgatgagtttggacaaaccacaactagaatgcagtgaaaaaaatgctttatttgtgaaatttgtgatgctattgctttatttgtaaccattataagctgcaataaacaagttaacaacaacaattgcattcattttatgtttcaggttcagggggaggtgtgggaggttttttagtcgactagagctcgctgatcagcctcgactgtgccttctagttgccagccatctgttgtttgcccctcccccgtgccttccttgaccctggaaggtgccactcccactgtcctttcctaataaaatgaggaaattgcatcgcattgtctgagtaggtgtcattctattctggggggtggggtggggcaggacagcaagggggaggattgggaagacaatagcaggcatgctggggagagatcgtgcggaccgagcggccgcaggaacccctagtgatggagttggccactccctctctgcgcgctcgctcgctcactgaggccgggcgaccaaaggtcgcccgacgcccgggctttgcccgggcggcctcagtgagcgagcgagcgcgcagagagggagtggcca

SEQ ID NO: 11261-11284 - skipped (24 entries)

SEQ ID NO: 11285 - DNA, 54 bp, synthetic construct; identical to SEQ ID NO: 9985
  misc_feature 1..54: note = pOB1012, Rabbit beta-globin exon
  source 1..54: mol_type = other DNA

SEQ ID NO: 11286-11299 - skipped (14 entries)

SEQ ID NO: 11300 - DNA, 6209 bp, synthetic construct
  misc_feature 1..6209: note = pOB1013, full plasmid
  source 1..6209: mol_type = other DNA
ctgcgcgctcgctcgctcactgaggccgcccgggcaaagcccgggcgtcgggcgacctttggtcgcccggcctcagtgagcgagcgagcgcgcagagagggagtggccaactccatcactaggggttcctgcggccgcaaccgtctagttattaatagtaatcaattacggggtcattagttcatagcccatatatggagttccgcgttacataacttacggtaaatggcccgcctggctgaccgcccaacgacccccgcccattgacgtcaataatgacgtatgttcccatagtaacgccaatagggactttccattgacgtcaatgggtggagtatttacggtaaactgcccacttggcagtacatcaagtgtatcatatgccaagtacgccccctattgacgtcaatgacggtaaatggcccgcctggcattatgcccagtacatgaccttatgggactttcctacttggcagtacatctacgtattagtcatcgctattaccatggtcgaggtgagccccacgttctgcttcactctccccatctcccccccctccccacccccaattttgtatttatttattttttaattattttgtgcagcgatgggggcggggggggggggggggcgcgcgccaggcggggcggggcggggcgaggggcggggcggggcgaggcggagaggtgcggcggcagccaatcagagcggcgcgctccgaaagtttccttttatggcgaggcggcggcggcggcggccctataaaaagcgaagcgcgcggcgggcgggagtcgctgcgcgctgccttcgccccgtgccccgctccgccgccgcctcgcgccgcccgccccggctctgactgaccgcgttactcccacaggtgagcgggcgggacggcccttctcctccgggctgtaattagcgcttggtttaatgacggcttgtttcttttctgtggctgcgtgaaagccttgaggggctccgggagctagagcctctgctaaccatgttcatgccttcttctttttcctacagctcctgggcaacgtgctggttattgtgctgtctcatcattttggcaaagaattcctcgaagatccgaaggggttcaagctcgcgtattgggatagcttccaccatgccggtgctctctaggccccggccctggcgggggaacacgctgaagcgcacggccgtgctcctggccctcgcggcctatggagcccacaaagtctaccccttggtgcgccagtgcctggccccggctaggggtcttcaggcgcccgccggggagcccacgcaggaggcctccggggtcgcggcggccaaagctggcatgaaccgggtattcctgcagcggctcctctggctcctgcggctgctgttcccccgggtcctctgccgggagacggggctgctggccctgcactcggccgccttggtgagccgcaccttcctgtcggtgtacgtggcccgcctggacggaaggctggcccgctgcatcgtccgcaaggacccgcgggcttttggctggcagctgctgcagtggctcctcatcgccctccctgctaccttcgtcaacagtgccatccgttacctggagggccaactggccctgtcgttccgcagccgtctggtggcccacgcctaccgcctctacttctcccagcagacctactaccgggtcagcaacatggacgggcggcttcgcaaccctgaccagtctctgacggaggacgtggtggcctttgcggcctctgtggcccacctctactccaacctgaccaagccactcctggacgtggctgtgacttcctacaccctgcttcgggcggcccgctcccgcggagccggcacagcctggccctcggccatcgccggcctcgtggtgttcctcacggccaacgtgctgcgggccttctcgcccaagttcggggagctggtggcagaggaggcgcggcggaagggggagctgcgctacatgcactcgcgtgtggtggccaactcggaggagatcgccttctatgggggccatgaggtggagctggccctgctacagcgctcctaccaggacctggcctcgcagatcaacctcatccttctggaacgcctctggtatgttatgctggagcagttcctcatgaagtatgtgtggagcgcctcgggcctgctcatggtggctgtccccatcatcactgccactggctactcagagtcagatgcagaggccgtgaagaaggcagccttggaaaagaaggaggaggagctggtgagcgagcgcacagaagccttcactattgcccgcaacctcctgacagcggctgcagatgccattgagcggatcatgtcgtcgtacaaggaggtgacggagctggctggctacacagcccgggtgcacgagatgttccaggtatttgaagatgttcagcgctgtcacttcaagaggcccagggagctagaggacgctcaggcggggtctgggaccataggccggtctggtgtccgtgtggagggccccctgaagatccgaggccaggtggtggacgtggaacaggggatcatctgcgagaacatccccatcgtcacgccctcaggagaggtggtggtggccagcctcaacatcagggtggaggaaggcatgcatctgctcatcacaggccccaatggctgcggcaagagctccctgttccggatcctgggtgggctctggcccacgtacggtggtgtgctctacaagcccccaccccagcgcatgttctacatcccgcagaggccctacatgtctgtgggctccctgcgtgaccaggtgatctacccggactcagtggaggacatgcaaaggaagggctactcggagcaggacctggaagccatcctggacgtcgtgcacctgcaccacatcctgcagcgggagggaggttgggaggctatgtgtgactggaaggacgtcctgtcgggtggcgagaagcagagaatcggcatggcccgcatgttctaccacaggcccaagtacgccctcctggatgaatgcaccagcgccgttagcatcgacgtggaaggcaagatcttccaggcggccaaggacgcgggcattgccctgctctccatcacccaccggccctccctgtggaaataccacacacacttgctacagttcgatggggagggcggctggaagttcgagaagctggactcagctgcccgcctgagcctgacggaggagaagcagcggctggagcagcagctggcgggcattcccaagatgcagcggcgcctccaggagctctgccagatcctgggcgaggccgtggccccagcgcatgtgccggcacctagcccgcaaggccctggtggcctccagggtgcctccacctgataactcgatcgactagagctcgctgatcagcctcgactgtgccttctagttgccagccatctgttgtttgcccctcccccgtgccttccttgaccctggaaggtgccactcccactgtcctttcctaataaaatgaggaaattgcatcgcattgtctgagtaggtgtcattctattctggggggtggggtggggcaggacagcaagggggaggattgggaagacaatagcaggcatgctggggagagatcgtgcggaccgagcggccgcaggaacccctagtgatggagttggccactccctctctgcgcgctcgctcgctcactgaggccgggcgaccaaaggtcgcccgacgcccgggctttgcccgggcggcctcagtgagcgagcgagcgcgcagctgcctgcaggggcgcctgatgcggtattttctccttacgcatctgtgcggtatttcacaccgcatacgtcaaagcaaccatagtacgcgccctgtagcggcgcattaagcgcggcgggtgtggtggttacgcgcagcgtgaccgctacacttgccagcgccttagcgcccgctcctttcgctttcttcccttcctttctcgccacgttcgccggctttccccgtcaagctctaaatcgggggctccctttagggttccgatttagtgctttacggcacctcgaccccaaaaaacttgatttgggtgatggttcacgtagtgggccatcgccctgatagacggtttttcgccctttgacgttggagtccacgttctttaatagtggactcttgttccaaactggaacaacactcaactctatctcgggctattcttttgatttataagggattttgccgatttcggtctattggttaaaaaatgagctgatttaacaaaaatttaacgcgaattttaacaaaatattaacgtttacaattttatggtgcactctcagtacaatctgctctgatgccgcatagttaagccagccccgacacccgccaacacccgctgacgcgccctgacgggcttgtctgctcccggcatccgcttacagacaagctgtgaccgtctccgggagctgcatgtgtcagaggttttcaccgtcatcaccgaaacgcgcgagacgaaagggcctcgtgatacgcctatttttataggttaatgtcatgacgcggaacccctatttgtttatttttctaaatacattcaaatatgtatccgctcatgagacaataaccctgataaatgcttcaataatattgaaaaaggaagagtatgagccatattcaacgggaaacgtcttgctctaggccgcgattaaattccaacatggatgctgatttatatgggtataaatgggctcgcgataatgtcgggcaatcaggtgcgacaatctatcgattgtatgggaagcccgatgcgccagagttgtttctgaaacatggcaaaggtagcgttgccaatgatgttacagatgagatggtcagactaaactggctgacggaatttatgcctcttccgaccatcaagcattttatccgtactcctgatgatgcatggttactcaccactgcgatccctgggaaaacagcattccaggtattagaagaatatcctgattcaggtgaaaatattgttgatgcgctggcagtgttcctgcgccggttgcattcgattcctgtttgtaattgtccttttaacagcgatcgcgtatttcgtctcgctcaggcgcaatcacgaatgaataacggtttggttgatgcgagtgattttgatgacgagcgtaatggctggcctgttgaacaagtctggaaagaaatgcataaacttttgccattctcaccggattcagtcgtcactcatggtgatttctcacttgataaccttatttttgacgaggggaaattaataggttgtattgatgttggacgagtcggaatcgcagaccgataccaggatcttgccatcctatggaactgcctcggtgagttttctccttcattacagaaacggctttttcaaaaatatggtattgataatcctgatatgaataaattgcagtttcatttgatgctcgatgagtttttctaatcatgaccaaaatcccttaacgtgagttttcgttccactgagcgtcagaccccgtagaaaagatcaaaggatcttcttgagatcctttttttctgcgcgtaatctgctgcttgcaaacaaaaaaaccaccgctaccagcggtggtttgtttgccggatcaagagctaccaactctttttccgaaggtaactggcttcagcagagcgcagataccaaatactgttcttctagtgtagccgtagttaggccaccacttcaagaactctgtagcaccgcctacatacctcgctctgctaatcctgttaccagtggctgctgccagtggcgataagtcgtgtcttaccgggttggactcaagacgatagttaccggataaggcgcagcggtcgggctgaacggggggttcgtgcacacagcccagcttggagcgaacgacctacaccgaactgagatacctacagcgtgagctatgagaaagcgccacgcttcccgaagggagaaaggcggacaggtatccggtaagcggcagggtcggaacaggagagcgcacgagggagcttccagggggaaacgcctggtatctttatagtcctgtcgggtttcgccacctctgacttgagcgtcgatttttgtgatgctcgtcaggggggcggagcctatggaaaaacgccagcaacgcggcctttttacggttcctggccttttgctggccttttgctcacatgtcctgcaggcag

SEQ ID NO: 11301 - DNA, 130 bp, synthetic construct; identical to SEQ ID NO: 10501
  misc_feature 1..130: note = pOB1013, 5'ITR
  source 1..130: mol_type = other DNA

SEQ ID NO: 11302-11304 - skipped (3 entries)

SEQ ID NO: 11305 - DNA, 366 bp, synthetic construct; identical to SEQ ID NO: 9905
  misc_feature 1..366: note = pOB1013, CMV Enhancer
  source 1..366: mol_type = other DNA

SEQ ID NO: 11306 - skipped

SEQ ID NO: 11307 - DNA, 278 bp, synthetic construct; identical to SEQ ID NO: 10
  misc_feature 1..278: note = pOB1013, CBA Promoter
  source 1..278: mol_type = other DNA

SEQ ID NO: 11308 - DNA, 93 bp, synthetic construct; identical to SEQ ID NO: 11
  misc_feature 1..93: note = pOB1013, beta-actin Exon
  source 1..93: mol_type = other DNA

SEQ ID NO: 11309 - DNA, 155 bp, synthetic construct; identical to SEQ ID NO: 9909
  misc_feature 1..155: note = pOB1013, Chimeric Intron
  source 1..155: mol_type = other DNA

SEQ ID NO: 11310 - skipped

SEQ ID NO: 11311 - DNA, 10 bp, synthetic construct
  misc_feature 1..10: note = pOB1013, Kozak Sequence
  source 1..10: mol_type = other DNA
tccaccatgc

SEQ ID NO: 11312 - DNA, 2241 bp, synthetic construct; identical to SEQ ID NO: 10512
  misc_feature 1..2241: note = pOB1013, hABCD1/9nt
  source 1..2241: mol_type = other DNA

SEQ ID NO: 11313-11315 - skipped (3 entries)

SEQ ID NO: 11316 - DNA, 208 bp, synthetic construct; identical to SEQ ID NO: 9916
  misc_feature 1..208: note = pOB1013, bGH pA
  source 1..208: mol_type = other DNA

SEQ ID NO: 11317 - skipped

SEQ ID NO: 11318 - DNA, 130 bp, synthetic construct; identical to SEQ ID NO: 10518
  misc_feature 1..130: note = pOB1013, 3'ITR
  source 1..130: mol_type = other DNA

SEQ ID NO: 11319-11349 - skipped (31 entries)

SEQ ID NO: 11350 - DNA, 3776 bp, synthetic construct
  misc_feature 1..3776: note = pOB1013, ITR-ITR
  source 1..3776: mol_type = other DNA
ctgcgcgctcgctcgctcactgaggccgcccgggcaaagcccgggcgtcgggcgacctttggtcgcccggcctcagtgagcgagcgagcgcgcagagagggagtggccaactccatcactaggggttcctgcggccgcaaccgtctagttattaatagtaatcaattacggggtcattagttcatagcccatatatggagttccgcgttacataacttacggtaaatggcccgcctggctgaccgcccaacgacccccgcccattgacgtcaataatgacgtatgttcccatagtaacgccaatagggactttccattgacgtcaatgggtggagtatttacggtaaactgcccacttggcagtacatcaagtgtatcatatgccaagtacgccccctattgacgtcaatgacggtaaatggcccgcctggcattatgcccagtacatgaccttatgggactttcctacttggcagtacatctacgtattagtcatcgctattaccatggtcgaggtgagccccacgttctgcttcactctccccatctcccccccctccccacccccaattttgtatttatttattttttaattattttgtgcagcgatgggggcggggggggggggggggcgcgcgccaggcggggcggggcggggcgaggggcggggcggggcgaggcggagaggtgcggcggcagccaatcagagcggcgcgctccgaaagtttccttttatggcgaggcggcggcggcggcggccctataaaaagcgaagcgcgcggcgggcgggagtcgctgcgcgctgccttcgccccgtgccccgctccgccgccgcctcgcgccgcccgccccggctctgactgaccgcgttactcccacaggtgagcgggcgggacggcccttctcctccgggctgtaattagcgcttggtttaatgacggcttgtttcttttctgtggctgcgtgaaagccttgaggggctccgggagctagagcctctgctaaccatgttcatgccttcttctttttcctacagctcctgggcaacgtgctggttattgtgctgtctcatcattttggcaaagaattcctcgaagatccgaaggggttcaagctcgcgtattgggatagcttccaccatgccggtgctctctaggccccggccctggcgggggaacacgctgaagcgcacggccgtgctcctggccctcgcggcctatggagcccacaaagtctaccccttggtgcgccagtgcctggccccggctaggggtcttcaggcgcccgccggggagcccacgcaggaggcctccggggtcgcggcggccaaagctggcatgaaccgggtattcctgcagcggctcctctggctcctgcggctgctgttcccccgggtcctctgccgggagacggggctgctggccctgcactcggccgccttggtgagccgcaccttcctgtcggtgtacgtggcccgcctggacggaaggctggcccgctgcatcgtccgcaaggacccgcgggcttttggctggcagctgctgcagtggctcctcatcgccctccctgctaccttcgtcaacagtgccatccgttacctggagggccaactggccctgtcgttccgcagccgtctggtggcccacgcctaccgcctctacttctcccagcagacctactaccgggtcagcaacatggacgggcggcttcgcaaccctgaccagtctctgacggaggacgtggtggcctttgcggcctctgtggcccacctctactccaacctgaccaagccactcctggacgtggctgtgacttcctacaccctgcttcgggcggcccgctcccgcggagccggcacagcctggccctcggccatcgccggcctcgtggtgttcctcacggccaacgtgctgcgggccttctcgcccaagttcggggagctggtggcagaggaggcgcggcggaagggggagctgcgctacatgcactcgcgtgtggtggccaactcggaggagatcgccttctatgggggccatgaggtggagctggccctgctacagcgctcctaccaggacctggcctcgcagatcaacctcatccttctggaacgcctctggtatgttatgctggagcagttcctcatgaagtatgtgtggagcgcctcgggcctgctcatggtggctgtccccatcatcactgccactggctactcagagtcagatgcagaggccgtgaagaaggcagccttggaaaagaaggaggaggagctggtgagcgagcgcacagaagccttcactattgcccgcaacctcctgacagcggctgcagatgccattgagcggatcatgtcgtcgtacaaggaggtgacggagctggctggctacacagcccgggtgcacgagatgttccaggtatttgaagatgttcagcgctgtcacttcaagaggcccagggagctagaggacgctcaggcggggtctgggaccataggccggtctggtgtccgtgtggagggccccctgaagatccgaggccaggtggtggacgtggaacaggggatcatctgcgagaacatccccatcgtcacgccctcaggagaggtggtggtggccagcctcaacatcagggtggaggaaggcatgcatctgctcatcacaggccccaatggctgcggcaagagctccctgttccggatcctgggtgggctctggcccacgtacggtggtgtgctctacaagcccccaccccagcgcatgttctacatcccgcagaggccctacatgtctgtgggctccctgcgtgaccaggtgatctacccggactcagtggaggacatgcaaaggaagggctactcggagcaggacctggaagccatcctggacgtcgtgcacctgcaccacatcctgcagcgggagggaggttgggaggctatgtgtgactggaaggacgtcctgtcgggtggcgagaagcagagaatcggcatggcccgcatgttctaccacaggcccaagtacgccctcctggatgaatgcaccagcgccgttagcatcgacgtggaaggcaagatcttccaggcggccaaggacgcgggcattgccctgctctccatcacccaccggccctccctgtggaaataccacacacacttgctacagttcgatggggagggcggctggaagttcgagaagctggactcagctgcccgcctgagcctgacggaggagaagcagcggctggagcagcagctggcgggcattcccaagatgcagcggcgcctccaggagctctgccagatcctgggcgaggccgtggccccagcgcatgtgccggcacctagcccgcaaggccctggtggcctccagggtgcctccacctgataactcgatcgactagagctcgctgatcagcctcgactgtgccttctagttgccagccatctgttgtttgcccctcccccgtgccttccttgaccctggaaggtgccactcccactgtcctttcctaataaaatgaggaaattgcatcgcattgtctgagtaggtgtcattctattctggggggtggggtggggcaggacagcaagggggaggattgggaagacaatagcaggcatgctggggagagatcgtgcggaccgagcggccgcaggaacccctagtgatggagttggccactccctctctgcgcgctcgctcgctcactgaggccgggcgaccaaaggtcgcccgacgcccgggctttgcccgggcggcctcagtgagcgagcgagcgcgcag

SEQ ID NO: 11351-11359 - skipped (9 entries)

SEQ ID NO: 11360 - DNA, 3804 bp, synthetic construct
  misc_feature 1..3804: note = pOB1013, rAAV vector genome
  source 1..3804: mol_type = other DNA
tggccactccctctctgcgcgctcgctcgctcactgaggccgcccgggcaaagcccgggcgtcgggcgacctttggtcgcccggcctcagtgagcgagcgagcgcgcagagagggagtggccaactccatcactaggggttcctgcggccgcaaccgtctagttattaatagtaatcaattacggggtcattagttcatagcccatatatggagttccgcgttacataacttacggtaaatggcccgcctggctgaccgcccaacgacccccgcccattgacgtcaataatgacgtatgttcccatagtaacgccaatagggactttccattgacgtcaatgggtggagtatttacggtaaactgcccacttggcagtacatcaagtgtatcatatgccaagtacgccccctattgacgtcaatgacggtaaatggcccgcctggcattatgcccagtacatgaccttatgggactttcctacttggcagtacatctacgtattagtcatcgctattaccatggtcgaggtgagccccacgttctgcttcactctccccatctcccccccctccccacccccaattttgtatttatttattttttaattattttgtgcagcgatgggggcggggggggggggggggcgcgcgccaggcggggcggggcggggcgaggggcggggcggggcgaggcggagaggtgcggcggcagccaatcagagcggcgcgctccgaaagtttccttttatggcgaggcggcggcggcggcggccctataaaaagcgaagcgcgcggcgggcgggagtcgctgcgcgctgccttcgccccgtgccccgctccgccgccgcctcgcgccgcccgccccggctctgactgaccgcgttactcccacaggtgagcgggcgggacggcccttctcctccgggctgtaattagcgcttggtttaatgacggcttgtttcttttctgtggctgcgtgaaagccttgaggggctccgggagctagagcctctgctaaccatgttcatgccttcttctttttcctacagctcctgggcaacgtgctggttattgtgctgtctcatcattttggcaaagaattcctcgaagatccgaaggggttcaagctcgcgtattgggatagcttccaccatgccggtgctctctaggccccggccctggcgggggaacacgctgaagcgcacggccgtgctcctggccctcgcggcctatggagcccacaaagtctaccccttggtgcgccagtgcctggccccggctaggggtcttcaggcgcccgccggggagcccacgcaggaggcctccggggtcgcggcggccaaagctggcatgaaccgggtattcctgcagcggctcctctggctcctgcggctgctgttcccccgggtcctctgccgggagacggggctgctggccctgcactcggccgccttggtgagccgcaccttcctgtcggtgtacgtggcccgcctggacggaaggctggcccgctgcatcgtccgcaaggacccgcgggcttttggctggcagctgctgcagtggctcctcatcgccctccctgctaccttcgtcaacagtgccatccgttacctggagggccaactggccctgtcgttccgcagccgtctggtggcccacgcctaccgcctctacttctcccagcagacctactaccgggtcagcaacatggacgggcggcttcgcaaccctgaccagtctctgacggaggacgtggtggcctttgcggcctctgtggcccacctctactccaacctgaccaagccactcctggacgtggctgtgacttcctacaccctgcttcgggcggcccgctcccgcggagccggcacagcctggccctcggccatcgccggcctcgtggtgttcctcacggccaacgtgctgcgggccttctcgcccaagttcggggagctggtggcagaggaggcgcggcggaagggggagctgcgctacatgcactcgcgtgtggtggccaactcggaggagatcgccttctatgggggccatgaggtggagctggccctgctacagcgctcctaccaggacctggcctcgcagatcaacctcatccttctggaacgcctctggtatgttatgctggagcagttcctcatgaagtatgtgtggagcgcctcgggcctgctcatggtggctgtccccatcatcactgccactggctactcagagtcagatgcagaggccgtgaagaaggcagccttggaaaagaaggaggaggagctggtgagcgagcgcacagaagccttcactattgcccgcaacctcctgacagcggctgcagatgccattgagcggatcatgtcgtcgtacaaggaggtgacggagctggctggctacacagcccgggtgcacgagatgttccaggtatttgaagatgttcagcgctgtcacttcaagaggcccagggagctagaggacgctcaggcggggtctgggaccataggccggtctggtgtccgtgtggagggccccctgaagatccgaggccaggtggtggacgtggaacaggggatcatctgcgagaacatccccatcgtcacgccctcaggagaggtggtggtggccagcctcaacatcagggtggaggaaggcatgcatctgctcatcacaggccccaatggctgcggcaagagctccctgttccggatcctgggtgggctctggcccacgtacggtggtgtgctctacaagcccccaccccagcgcatgttctacatcccgcagaggccctacatgtctgtgggctccctgcgtgaccaggtgatctacccggactcagtggaggacatgcaaaggaagggctactcggagcaggacctggaagccatcctggacgtcgtgcacctgcaccacatcctgcagcgggagggaggttgggaggctatgtgtgactggaaggacgtcctgtcgggtggcgagaagcagagaatcggcatggcccgcatgttctaccacaggcccaagtacgccctcctggatgaatgcaccagcgccgttagcatcgacgtggaaggcaagatcttccaggcggccaaggacgcgggcattgccctgctctccatcacccaccggccctccctgtggaaataccacacacacttgctacagttcgatggggagggcggctggaagttcgagaagctggactcagctgcccgcctgagcctgacggaggagaagcagcggctggagcagcagctggcgggcattcccaagatgcagcggcgcctccaggagctctgccagatcctgggcgaggccgtggccccagcgcatgtgccggcacctagcccgcaaggccctggtggcctccagggtgcctccacctgataactcgatcgactagagctcgctgatcagcctcgactgtgccttctagttgccagccatctgttgtttgcccctcccccgtgccttccttgaccctggaaggtgccactcccactgtcctttcctaataaaatgaggaaattgcatcgcattgtctgagtaggtgtcattctattctggggggtggggtggggcaggacagcaagggggaggattgggaagacaatagcaggcatgctggggagagatcgtgcggaccgagcggccgcaggaacccctagtgatggagttggccactccctctctgcgcgctcgctcgctcactgaggccgggcgaccaaaggtcgcccgacgcccgggctttgcccgggcggcctcagtgagcgagcgagcgcgcagagagggagtggcca

SEQ ID NO: 11361-11384 - skipped (24 entries)

SEQ ID NO: 11385 - DNA, 54 bp, synthetic construct; identical to SEQ ID NO: 9985
  misc_feature 1..54: note = pOB1013, Rabbit beta-globin exon
  source 1..54: mol_type = other DNA

SEQ ID NO: 11386-11499 - skipped (114 entries)

SEQ ID NO: 11500 - DNA, 6353 bp, synthetic construct
  misc_feature 1..6353: note = pOB1015, full plasmid
  source 1..6353: mol_type = other DNA
ctgcgcgctcgctcgctcactgaggccgcccgggcaaagcccgggcgtcgggcgacctttggtcgcccggcctcagtgagcgagcgagcgcgcagagagggagtggccaactccatcactaggggttcctgcggccgcaaccgtctagttattaatagtaatcaattacggggtcattagttcatagcccatatatggagttccgcgttacataacttacggtaaatggcccgcctggctgaccgcccaacgacccccgcccattgacgtcaataatgacgtatgttcccatagtaacgccaatagggactttccattgacgtcaatgggtggagtatttacggtaaactgcccacttggcagtacatcaagtgtatcatatgccaagtacgccccctattgacgtcaatgacggtaaatggcccgcctggcattatgcccagtacatgaccttatgggactttcctacttggcagtacatctacgtattagtcatcgctattaccatggtcgaggtgagccccacgttctgcttcactctccccatctcccccccctccccacccccaattttgtatttatttattttttaattattttgtgcagcgatgggggcggggggggggggggggcgcgcgccaggcggggcggggcggggcgaggggcggggcggggcgaggcggagaggtgcggcggcagccaatcagagcggcgcgctccgaaagtttccttttatggcgaggcggcggcggcggcggccctataaaaagcgaagcgcgcggcgggcgggagtcgctgcgcgctgccttcgccccgtgccccgctccgccgccgcctcgcgccgcccgccccggctctgactgaccgcgttactcccacaggtgagcgggcgggacggcccttctcctccgggctgtaattagcgcttggtttaatgacggcttgtttcttttctgtggctgcgtgaaagccttgaggggctccgggagctagagcctctgctaaccatgttcatgccttcttctttttcctacagctcctgggcaacgtgctggttattgtgctgtctcatcattttggcaaagaattcctcgaagatccgaaggggttcaagctttccagttgcctagacaacaggcccagggtcagagcaacaatccttccagccacctgcctcaactgctgccccaggcaccagccccagtccctacgcggcagccagcccaggtgacatgccggtgctctccaggccccggccctggcgggggaacacgctgaagcgcacggccgtgctcctggccctcgcggcctatggagcccacaaagtctaccccttggtgcgccagtgcctggccccggccaggggtcttcaggcgcccgccggggagcccacgcaggaggcctccggggtcgcggcggccaaagctggcatgaaccgggtattcctgcagcggctcctgtggctcctgcggctgctgttcccccgggtcctgtgccgggagacggggctgctggccctgcactcggccgccttggtgagccgcaccttcctgtcggtgtacgtggcccgcctggacggaaggctggcccgctgcatcgtccgcaaggacccgcgggcttttggctggcagctgctgcagtggctcctcatcgccctccctgctaccttcgtcaacagtgccatccgttacctggagggccaactggccctgtcgttccgcagccgtctggtggcccacgcctaccgcctctacttctcccagcagacctactaccgggtcagcaacatggacgggcggcttcgcaaccctgaccagtctctgacggaggacgtggtggcctttgcggcctctgtggcccacctctactccaacctgaccaagccactcctggacgtggctgtgacttcctacaccctgcttcgggcggcccgctcccgtggagccggcacagcctggccctcggccatcgccggcctcgtggtgttcctcacggccaacgtgctgcgggccttctcgcccaagttcggggagctggtggcagaggaggcgcggcggaagggggagctgcgctacatgcactcgcgtgtggtggccaactcggaggagatcgccttctatgggggccatgaggtggagctggccctgctacagcgctcctaccaggacctggcctcgcagatcaacctcatccttctggaacgcctgtggtatgttatgctggagcagttcctcatgaagtatgtgtggagcgcctcgggcctgctcatggtggctgtccccatcatcactgccactggctactcagagtcagatgcagaggccgtgaagaaggcagccttggaaaagaaggaggaggagctggtgagcgagcgcacagaagccttcactattgcccgcaacctcctgacagcggctgcagatgccattgagcggatcatgtcgtcgtacaaggaggtgacggagctggctggctacacagcccgggtgcacgagatgttccaggtatttgaagatgttcagcgctgtcacttcaagaggcccagggagctagaggacgctcaggcggggtctgggaccataggccggtctggtgtccgtgtggagggccccctgaagatccgaggccaggtggtggacgtggaacaggggatcatctgcgagaacatccccatcgtcacgccctcaggagaggtggtggtggccagcctcaacatcagggtggaggaaggcatgcatctgctcatcacaggccccaatggctgcggcaagagctccctgttccggatcctgggtgggctctggcccacgtacggtggtgtgctctacaagcccccaccccagcgcatgttctacatcccgcagaggccctacatgtctgtgggctccctgcgtgaccaggtgatctacccggactcagtggaggacatgcaaaggaagggctactcggagcaggacctggaagccatcctggacgtcgtgcacctgcaccacatcctgcagcgggagggaggttgggaggctatgtgtgactggaaggacgtcctgtcgggtggcgagaagcagagaatcggcatggcccgcatgttctaccacaggcccaagtacgccctcctggatgaatgcaccagcgccgttagcatcgacgtggaaggcaagatcttccaggcggccaaggacgcgggcattgccctgctctccatcacccaccggccctccctgtggaaataccacacacacttgctacagttcgatggggagggcggctggaagttcgagaagctggactcagctgcccgcctgagcctgacggaggagaagcagcggctggagcagcagctggcgggcattcccaagatgcagcggcgcctccaggagctctgccagatcctgggcgaggccgtggccccagcgcatgtgccggcacctagcccgcaaggccctggtggcctccagggtgcctccacctgacacaaccgtccccggcccctgccccgcccccaagctcggatcacatgaattctgcagattcgactagagctcgctgatcagcctcgactgtgccttctagttgccagccatctgttgtttgcccctcccccgtgccttccttgaccctggaaggtgccactcccactgtcctttcctaataaaatgaggaaattgcatcgcattgtctgagtaggtgtcattctattctggggggtggggtggggcaggacagcaagggggaggattgggaagacaatagcaggcatgctggggagagatcgtgcggaccgagcggccgcaggaacccctagtgatggagttggccactccctctctgcgcgctcgctcgctcactgaggccgggcgaccaaaggtcgcccgacgcccgggctttgcccgggcggcctcagtgagcgagcgagcgcgcagctgcctgcaggggcgcctgatgcggtattttctccttacgcatctgtgcggtatttcacaccgcatacgtcaaagcaaccatagtacgcgccctgtagcggcgcattaagcgcggcgggtgtggtggttacgcgcagcgtgaccgctacacttgccagcgccttagcgcccgctcctttcgctttcttcccttcctttctcgccacgttcgccggctttccccgtcaagctctaaatcgggggctccctttagggttccgatttagtgctttacggcacctcgaccccaaaaaacttgatttgggtgatggttcacgtagtgggccatcgccctgatagacggtttttcgccctttgacgttggagtccacgttctttaatagtggactcttgttccaaactggaacaacactcaactctatctcgggctattcttttgatttataagggattttgccgatttcggtctattggttaaaaaatgagctgatttaacaaaaatttaacgcgaattttaacaaaatattaacgtttacaattttatggtgcactctcagtacaatctgctctgatgccgcatagttaagccagccccgacacccgccaacacccgctgacgcgccctgacgggcttgtctgctcccggcatccgcttacagacaagctgtgaccgtctccgggagctgcatgtgtcagaggttttcaccgtcatcaccgaaacgcgcgagacgaaagggcctcgtgatacgcctatttttataggttaatgtcatgacgcggaacccctatttgtttatttttctaaatacattcaaatatgtatccgctcatgagacaataaccctgataaatgcttcaataatattgaaaaaggaagagtatgagccatattcaacgggaaacgtcttgctctaggccgcgattaaattccaacatggatgctgatttatatgggtataaatgggctcgcgataatgtcgggcaatcaggtgcgacaatctatcgattgtatgggaagcccgatgcgccagagttgtttctgaaacatggcaaaggtagcgttgccaatgatgttacagatgagatggtcagactaaactggctgacggaatttatgcctcttccgaccatcaagcattttatccgtactcctgatgatgcatggttactcaccactgcgatccctgggaaaacagcattccaggtattagaagaatatcctgattcaggtgaaaatattgttgatgcgctggcagtgttcctgcgccggttgcattcgattcctgtttgtaattgtccttttaacagcgatcgcgtatttcgtctcgctcaggcgcaatcacgaatgaataacggtttggttgatgcgagtgattttgatgacgagcgtaatggctggcctgttgaacaagtctggaaagaaatgcataaacttttgccattctcaccggattcagtcgtcactcatggtgatttctcacttgataaccttatttttgacgaggggaaattaataggttgtattgatgttggacgagtcggaatcgcagaccgataccaggatcttgccatcctatggaactgcctcggtgagttttctccttcattacagaaacggctttttcaaaaatatggtattgataatcctgatatgaataaattgcagtttcatttgatgctcgatgagtttttctaatcatgaccaaaatcccttaacgtgagttttcgttccactgagcgtcagaccccgtagaaaagatcaaaggatcttcttgagatcctttttttctgcgcgtaatctgctgcttgcaaacaaaaaaaccaccgctaccagcggtggtttgtttgccggatcaagagctaccaactctttttccgaaggtaactggcttcagcagagcgcagataccaaatactgttcttctagtgtagccgtagttaggccaccacttcaagaactctgtagcaccgcctacatacctcgctctgctaatcctgttaccagtggctgctgccagtggcgataagtcgtgtcttaccgggttggactcaagacgatagttaccggataaggcgcagcggtcgggctgaacggggggttcgtgcacacagcccagcttggagcgaacgacctacaccgaactgagatacctacagcgtgagctatgagaaagcgccacgcttcccgaagggagaaaggcggacaggtatccggtaagcggcagggtcggaacaggagagcgcacgagggagcttccagggggaaacgcctggtatctttatagtcctgtcgggtttcgccacctctgacttgagcgtcgatttttgtgatgctcgtcaggggggcggagcctatggaaaaacgccagcaacgcggcctttttacggttcctggccttttgctggccttttgctcacatgtcctgcaggcag

SEQ ID NO: 11501 - DNA, 130 bp, synthetic construct; identical to SEQ ID NO: 10501
  misc_feature 1..130: note = pOB1015, 5'ITR
  source 1..130: mol_type = other DNA

SEQ ID NO: 11502-11504 - skipped (3 entries)

SEQ ID NO: 11505 - DNA, 366 bp, synthetic construct; identical to SEQ ID NO: 9905
  misc_feature 1..366: note = pOB1015, CMV Enhancer
  source 1..366: mol_type = other DNA

SEQ ID NO: 11506 - skipped

SEQ ID NO: 11507 - DNA, 278 bp, synthetic construct; identical to SEQ ID NO: 10
  misc_feature 1..278: note = pOB1015, CBA Promoter
  source 1..278: mol_type = other DNA

SEQ ID NO: 11508 - DNA, 93 bp, synthetic construct; identical to SEQ ID NO: 11
  misc_feature 1..93: note = pOB1015, beta-actin Exon
  source 1..93: mol_type = other DNA

SEQ ID NO: 11509 - DNA, 155 bp, synthetic construct; identical to SEQ ID NO: 9909
  misc_feature 1..155: note = pOB1015, Chimeric Intron
  source 1..155: mol_type = other DNA

SEQ ID NO: 11510 - DNA, 117 bp, synthetic construct; identical to SEQ ID NO: 9910
  misc_feature 1..117: note = pOB1015, hABCD1 5' UTR
  source 1..117: mol_type = other DNA

SEQ ID NO: 11511 - skipped

SEQ ID NO: 11512 - DNA, 2238 bp, synthetic construct
  misc_feature 1..2238: note = pOB1015, hABCD1/3nt
  source 1..2238: mol_type = other DNA
atgccggtgctctccaggccccggccctggcgggggaacacgctgaagcgcacggccgtgctcctggccctcgcggcctatggagcccacaaagtctaccccttggtgcgccagtgcctggccccggccaggggtcttcaggcgcccgccggggagcccacgcaggaggcctccggggtcgcggcggccaaagctggcatgaaccgggtattcctgcagcggctcctgtggctcctgcggctgctgttcccccgggtcctgtgccgggagacggggctgctggccctgcactcggccgccttggtgagccgcaccttcctgtcggtgtacgtggcccgcctggacggaaggctggcccgctgcatcgtccgcaaggacccgcgggcttttggctggcagctgctgcagtggctcctcatcgccctccctgctaccttcgtcaacagtgccatccgttacctggagggccaactggccctgtcgttccgcagccgtctggtggcccacgcctaccgcctctacttctcccagcagacctactaccgggtcagcaacatggacgggcggcttcgcaaccctgaccagtctctgacggaggacgtggtggcctttgcggcctctgtggcccacctctactccaacctgaccaagccactcctggacgtggctgtgacttcctacaccctgcttcgggcggcccgctcccgtggagccggcacagcctggccctcggccatcgccggcctcgtggtgttcctcacggccaacgtgctgcgggccttctcgcccaagttcggggagctggtggcagaggaggcgcggcggaagggggagctgcgctacatgcactcgcgtgtggtggccaactcggaggagatcgccttctatgggggccatgaggtggagctggccctgctacagcgctcctaccaggacctggcctcgcagatcaacctcatccttctggaacgcctgtggtatgttatgctggagcagttcctcatgaagtatgtgtggagcgcctcgggcctgctcatggtggctgtccccatcatcactgccactggctactcagagtcagatgcagaggccgtgaagaaggcagccttggaaaagaaggaggaggagctggtgagcgagcgcacagaagccttcactattgcccgcaacctcctgacagcggctgcagatgccattgagcggatcatgtcgtcgtacaaggaggtgacggagctggctggctacacagcccgggtgcacgagatgttccaggtatttgaagatgttcagcgctgtcacttcaagaggcccagggagctagaggacgctcaggcggggtctgggaccataggccggtctggtgtccgtgtggagggccccctgaagatccgaggccaggtggtggacgtggaacaggggatcatctgcgagaacatccccatcgtcacgccctcaggagaggtggtggtggccagcctcaacatcagggtggaggaaggcatgcatctgctcatcacaggccccaatggctgcggcaagagctccctgttccggatcctgggtgggctctggcccacgtacggtggtgtgctctacaagcccccaccccagcgcatgttctacatcccgcagaggccctacatgtctgtgggctccctgcgtgaccaggtgatctacccggactcagtggaggacatgcaaaggaagggctactcggagcaggacctggaagccatcctggacgtcgtgcacctgcaccacatcctgcagcgggagggaggttgggaggctatgtgtgactggaaggacgtcctgtcgggtggcgagaagcagagaatcggcatggcccgcatgttctaccacaggcccaagtacgccctcctggatgaatgcaccagcgccgttagcatcgacgtggaaggcaagatcttccaggcggccaaggacgcgggcattgccctgctctccatcacccaccggccctccctgtggaaataccacacacacttgctacagttcgatggggagggcggctggaagttcgagaagctggactcagctgcccgcctgagcctgacggaggagaagcagcggctggagcagcagctggcgggcattcccaagatgcagcggcgcctccaggagctctgccagatcctgggcgaggccgtggccccagcgcatgtgccggcacctagcccgcaaggccctggtggcctccagggtgcctccacctga

SEQ ID NO: 11513 - DNA, 49 bp, synthetic construct; identical to SEQ ID NO: 9913
  misc_feature 1..49: note = pOB1015, hABCD1 3' UTR
  source 1..49: mol_type = other DNA

SEQ ID NO: 11514-11515 - skipped (2 entries)

SEQ ID NO: 11516 - DNA, 208 bp, synthetic construct; identical to SEQ ID NO: 9916
  misc_feature 1..208: note = pOB1015, bGH pA
  source 1..208: mol_type = other DNA

SEQ ID NO: 11517 - skipped

SEQ ID NO: 11518 - DNA, 130 bp, synthetic construct; identical to SEQ ID NO: 10518
  misc_feature 1..130: note = pOB1015, 3'ITR
  source 1..130: mol_type = other DNA

SEQ ID NO: 11519-11549 - skipped (31 entries)

SEQ ID NO: 11550 - DNA, 3920 bp, synthetic construct
  misc_feature 1..3920: note = pOB1015, ITR-ITR
  source 1..3920: mol_type = other DNA
ctgcgcgctcgctcgctcactgaggccgcccgggcaaagcccgggcgtcgggcgacctttggtcgcccggcctcagtgagcgagcgagcgcgcagagagggagtggccaactccatcactaggggttcctgcggccgcaaccgtctagttattaatagtaatcaattacggggtcattagttcatagcccatatatggagttccgcgttacataacttacggtaaatggcccgcctggctgaccgcccaacgacccccgcccattgacgtcaataatgacgtatgttcccatagtaacgccaatagggactttccattgacgtcaatgggtggagtatttacggtaaactgcccacttggcagtacatcaagtgtatcatatgccaagtacgccccctattgacgtcaatgacggtaaatggcccgcctggcattatgcccagtacatgaccttatgggactttcctacttggcagtacatctacgtattagtcatcgctattaccatggtcgaggtgagccccacgttctgcttcactctccccatctcccccccctccccacccccaattttgtatttatttattttttaattattttgtgcagcgatgggggcggggggggggggggggcgcgcgccaggcggggcggggcggggcgaggggcggggcggggcgaggcggagaggtgcggcggcagccaatcagagcggcgcgctccgaaagtttccttttatggcgaggcggcggcggcggcggccctataaaaagcgaagcgcgcggcgggcgggagtcgctgcgcgctgccttcgccccgtgccccgctccgccgccgcctcgcgccgcccgccccggctctgactgaccgcgttactcccacaggtgagcgggcgggacggcccttctcctccgggctgtaattagcgcttggtttaatgacggcttgtttcttttctgtggctgcgtgaaagccttgaggggctccgggagctagagcctctgctaaccatgttcatgccttcttctttttcctacagctcctgggcaacgtgctggttattgtgctgtctcatcattttggcaaagaattcctcgaagatccgaaggggttcaagctttccagttgcctagacaacaggcccagggtcagagcaacaatccttccagccacctgcctcaactgctgccccaggcaccagccccagtccctacgcggcagccagcccaggtgacatgccggtgctctccaggccccggccctggcgggggaacacgctgaagcgcacggccgtgctcctggccctcgcggcctatggagcccacaaagtctaccccttggtgcgccagtgcctggccccggccaggggtcttcaggcgcccgccggggagcccacgcaggaggcctccggggtcgcggcggccaaagctggcatgaaccgggtattcctgcagcggctcctgtggctcctgcggctgctgttcccccgggtcctgtgccgggagacggggctgctggccctgcactcggccgccttggtgagccgcaccttcctgtcggtgtacgtggcccgcctggacggaaggctggcccgctgcatcgtccgcaaggacccgcgggcttttggctggcagctgctgcagtggctcctcatcgccctccctgctaccttcgtcaacagtgccatccgttacctggagggccaactggccctgtcgttccgcagccgtctggtggcccacgcctaccgcctctacttctcccagcagacctactaccgggtcagcaacatggacgggcggcttcgcaaccctgaccagtctctgacggaggacgtggtggcctttgcggcctctgtggcccacctctactccaacctgaccaagccactcctggacgtggctgtgacttcctacaccctgcttcgggcggcccgctcccgtggagccggcacagcctggccctcggccatcgccggcctcgtggtgttcctcacggccaacgtgctgcgggccttctcgcccaagttcggggagctggtggcagaggaggcgcggcggaagggggagctgcgctacatgcactcgcgtgtggtggccaactcggaggagatcgccttctatgggggccatgaggtggagctggccctgctacagcgctcctaccaggacctggcctcgcagatcaacctcatccttctggaacgcctgtggtatgttatgctggagcagttcctcatgaagtatgtgtggagcgcctcgggcctgctcatggtggctgtccccatcatcactgccactggctactcagagtcagatgcagaggccgtgaagaaggcagccttggaaaagaaggaggaggagctggtgagcgagcgcacagaagccttcactattgcccgcaacctcctgacagcggctgcagatgccattgagcggatcatgtcgtcgtacaaggaggtgacggagctggctggctacacagcccgggtgcacgagatgttccaggtatttgaagatgttcagcgctgtcacttcaagaggcccagggagctagaggacgctcaggcggggtctgggaccataggccggtctggtgtccgtgtggagggccccctgaagatccgaggccaggtggtggacgtggaacaggggatcatctgcgagaacatccccatcgtcacgccctcaggagaggtggtggtggccagcctcaacatcagggtggaggaaggcatgcatctgctcatcacaggccccaatggctgcggcaagagctccctgttccggatcctgggtgggctctggcccacgtacggtggtgtgctctacaagcccccaccccagcgcatgttctacatcccgcagaggccctacatgtctgtgggctccctgcgtgaccaggtgatctacccggactcagtggaggacatgcaaaggaagggctactcggagcaggacctggaagccatcctggacgtcgtgcacctgcaccacatcctgcagcgggagggaggttgggaggctatgtgtgactggaaggacgtcctgtcgggtggcgagaagcagagaatcggcatggcccgcatgttctaccacaggcccaagtacgccctcctggatgaatgcaccagcgccgttagcatcgacgtggaaggcaagatcttccaggcggccaaggacgcgggcattgccctgctctccatcacccaccggccctccctgtggaaataccacacacacttgctacagttcgatggggagggcggctggaagttcgagaagctggactcagctgcccgcctgagcctgacggaggagaagcagcggctggagcagcagctggcgggcattcccaagatgcagcggcgcctccaggagctctgccagatcctgggcgaggccgtggccccagcgcatgtgccggcacctagcccgcaaggccctggtggcctccagggtgcctccacctgacacaaccgtccccggcccctgccccgcccccaagctcggatcacatgaattctgcagattcgactagagctcgctgatcagcctcgactgtgccttctagttgccagccatctgttgtttgcccctcccccgtgccttccttgaccctggaaggtgccactcccactgtcctttcctaataaaatgaggaaattgcatcgcattgtctgagtaggtgtcattctattctggggggtggggtggggcaggacagcaagggggaggattgggaagacaatagcaggcatgctggggagagatcgtgcggaccgagcggccgcaggaacccctagtgatggagttggccactccctctctgcgcgctcgctcgctcactgaggccgggcgaccaaaggtcgcccgacgcccgggctttgcccgggcggcctcagtgagcgagcgagcgcgcag

SEQ ID NO: 11551-11559 - skipped (9 entries)

SEQ ID NO: 11560 - DNA, 3948 bp, synthetic construct
  misc_feature 1..3948: note = pOB1015, rAAV vector genome
  source 1..3948: mol_type = other DNA
tggccactccctctctgcgcgctcgctcgctcactgaggccgcccgggcaaagcccgggcgtcgggcgacctttggtcgcccggcctcagtgagcgagcgagcgcgcagagagggagtggccaactccatcactaggggttcctgcggccgcaaccgtctagttattaatagtaatcaattacggggtcattagttcatagcccatatatggagttccgcgttacataacttacggtaaatggcccgcctggctgaccgcccaacgacccccgcccattgacgtcaataatgacgtatgttcccatagtaacgccaatagggactttccattgacgtcaatgggtggagtatttacggtaaactgcccacttggcagtacatcaagtgtatcatatgccaagtacgccccctattgacgtcaatgacggtaaatggcccgcctggcattatgcccagtacatgaccttatgggactttcctacttggcagtacatctacgtattagtcatcgctattaccatggtcgaggtgagccccacgttctgcttcactctccccatctcccccccctccccacccccaattttgtatttatttattttttaattattttgtgcagcgatgggggcggggggggggggggggcgcgcgccaggcggggcggggcggggcgaggggcggggcggggcgaggcggagaggtgcggcggcagccaatcagagcggcgcgctccgaaagtttccttttatggcgaggcggcggcggcggcggccctataaaaagcgaagcgcgcggcgggcgggagtcgctgcgcgctgccttcgccccgtgccccgctccgccgccgcctcgcgccgcccgccccggctctgactgaccgcgttactcccacaggtgagcgggcgggacggcccttctcctccgggctgtaattagcgcttggtttaatgacggcttgtttcttttctgtggctgcgtgaaagccttgaggggctccgggagctagagcctctgctaaccatgttcatgccttcttctttttcctacagctcctgggcaacgtgctggttattgtgctgtctcatcattttggcaaagaattcctcgaagatccgaaggggttcaagctttccagttgcctagacaacaggcccagggtcagagcaacaatccttccagccacctgcctcaactgctgccccaggcaccagccccagtccctacgcggcagccagcccaggtgacatgccggtgctctccaggccccggccctggcgggggaacacgctgaagcgcacggccgtgctcctggccctcgcggcctatggagcccacaaagtctaccccttggtgcgccagtgcctggccccggccaggggtcttcaggcgcccgccggggagcccacgcaggaggcctccggggtcgcggcggccaaagctggcatgaaccgggtattcctgcagcggctcctgtggctcctgcggctgctgttcccccgggtcctgtgccgggagacggggctgctggccctgcactcggccgccttggtgagccgcaccttcctgtcggtgtacgtggcccgcctggacggaaggctggcccgctgcatcgtccgcaaggacccgcgggcttttggctggcagctgctgcagtggctcctcatcgccctccctgctaccttcgtcaacagtgccatccgttacctggagggccaactggccctgtcgttccgcagccgtctggtggcccacgcctaccgcctctacttctcccagcagacctactaccgggtcagcaacatggacgggcggcttcgcaaccctgaccagtctctgacggaggacgtggtggcctttgcggcctctgtggcccacctctactccaacctgaccaagccactcctggacgtggctgtgacttcctacaccctgcttcgggcggcccgctcccgtggagccggcacagcctggccctcggccatcgccggcctcgtggtgttcctcacggccaacgtgctgcgggccttctcgcccaagttcggggagctggtggcagaggaggcgcggcggaagggggagctgcgctacatgcactcgcgtgtggtggccaactcggaggagatcgccttctatgggggccatgaggtggagctggccctgctacagcgctcctaccaggacctggcctcgcagatcaacctcatccttctggaacgcctgtggtatgttatgctggagcagttcctcatgaagtatgtgtggagcgcctcgggcctgctcatggtggctgtccccatcatcactgccactggctactcagagtcagatgcagaggccgtgaagaaggcagccttggaaaagaaggaggaggagctggtgagcgagcgcacagaagccttcactattgcccgcaacctcctgacagcggctgcagatgccattgagcggatcatgtcgtcgtacaaggaggtgacggagctggctggctacacagcccgggtgcacgagatgttccaggtatttgaagatgttcagcgctgtcacttcaagaggcccagggagctagaggacgctcaggcggggtctgggaccataggccggtctggtgtccgtgtggagggccccctgaagatccgaggccaggtggtggacgtggaacaggggatcatctgcgagaacatccccatcgtcacgccctcaggagaggtggtggtggccagcctcaacatcagggtggaggaaggcatgcatctgctcatcacaggccccaatggctgcggcaagagctccctgttccggatcctgggtgggctctggcccacgtacggtggtgtgctctacaagcccccaccccagcgcatgttctacatcccgcagaggccctacatgtctgtgggctccctgcgtgaccaggtgatctacccggactcagtggaggacatgcaaaggaagggctactcggagcaggacctggaagccatcctggacgtcgtgcacctgcaccacatcctgcagcgggagggaggttgggaggctatgtgtgactggaaggacgtcctgtcgggtggcgagaagcagagaatcggcatggcccgcatgttctaccacaggcccaagtacgccctcctggatgaatgcaccagcgccgttagcatcgacgtggaaggcaagatcttccaggcggccaaggacgcgggcattgccctgctctccatcacccaccggccctccctgtggaaataccacacacacttgctacagttcgatggggagggcggctggaagttcgagaagctggactcagctgcccgcctgagcctgacggaggagaagcagcggctggagcagcagctggcgggcattcccaagatgcagcggcgcctccaggagctctgccagatcctgggcgaggccgtggccccagcgcatgtgccggcacctagcccgcaaggccctggtggcctccagggtgcctccacctgacacaaccgtccccggcccctgccccgcccccaagctcggatcacatgaattctgcagattcgactagagctcgctgatcagcctcgactgtgccttctagttgccagccatctgttgtttgcccctcccccgtgccttccttgaccctggaaggtgccactcccactgtcctttcctaataaaatgaggaaattgcatcgcattgtctgagtaggtgtcattctattctggggggtggggtggggcaggacagcaagggggaggattgggaagacaatagcaggcatgctggggagagatcgtgcggaccgagcggccgcaggaacccctagtgatggagttggccactccctctctgcgcgctcgctcgctcactgaggccgggcgaccaaaggtcgcccgacgcccgggctttgcccgggcggcctcagtgagcgagcgagcgcgcagagagggagtggcca

SEQ ID NO: 11561-11584 - skipped (24 entries)

SEQ ID NO: 11585 - DNA, 54 bp, synthetic construct; identical to SEQ ID NO: 9985
  misc_feature 1..54: note = pOB1015, Rabbit beta-globin exon
  source 1..54: mol_type = other DNA

SEQ ID NO: 11586-11699 - skipped (114 entries)

SEQ ID NO: 11700 - DNA, 6598 bp, synthetic construct
  misc_feature 1..6598: note = pOB1017, full plasmid
  source 1..6598: mol_type = other DNA
ctgcgcgctcgctcgctcactgaggccgcccgggcaaagcccgggcgtcgggcgacctttggtcgcccggcctcagtgagcgagcgagcgcgcagagagggagtggccaactccatcactaggggttcctgcggccgcaaccgtctagttattaatagtaatcaattacggggtcattagttcatagcccatatatggagttccgcgttacataacttacggtaaatggcccgcctggctgaccgcccaacgacccccgcccattgacgtcaataatgacgtatgttcccatagtaacgccaatagggactttccattgacgtcaatgggtggagtatttacggtaaactgcccacttggcagtacatcaagtgtatcatatgccaagtacgccccctattgacgtcaatgacggtaaatggcccgcctggcattatgcccagtacatgaccttatgggactttcctacttggcagtacatctacgtattagtcatcgctattaccatggtcgaggtgagccccacgttctgcttcactctccccatctcccccccctccccacccccaattttgtatttatttattttttaattattttgtgcagcgatgggggcggggggggggggggggcgcgcgccaggcggggcggggcggggcgaggggcggggcggggcgaggcggagaggtgcggcggcagccaatcagagcggcgcgctccgaaagtttccttttatggcgaggcggcggcggcggcggccctataaaaagcgaagcgcgcggcgggcgggagtcgctgcgcgctgccttcgccccgtgccccgctccgccgccgcctcgcgccgcccgccccggctctgactgaccgcgttactcccacaggtgagcgggcgggacggcccttctcctccgggctgtaattagcgcttggtttaatgacggcttgtttcttttctgtggctgcgtgaaagccttgaggggctccgggagctagagcctctgctaaccatgttcatgccttcttctttttcctacagctcctgggcaacgtgctggttattgtgctgtctcatcattttggcaaagaattcctcgaagatccgaaggggttcaagctttccagttgcctagacaacaggcccagggtcagagcaacaatccttccagccacctgcctcaactgctgccccaggcaccagccccagtccctacgcggcagccagcccaggtgacatgccggtgctctccaggccccggccctggcgggggaacacgctgaagcgcacggccgtgctcctggccctcgcggcctatggagcccacaaagtctaccccttggtgcgccagtgcctggccccggccaggggtcttcaggcgcccgccggggagcccacgcaggaggcctccggggtcgcggcggccaaagctggcatgaaccgggtattcctgcagcggctcctgtggctcctgcggctgctgttcccccgggtcctgtgccgggagacggggctgctggccctgcactcggccgccttggtgagccgcaccttcctgtcggtgtacgtggcccgcctggacggaaggctggcccgctgcatcgtccgcaaggacccgcgggcttttggctggcagctgctgcagtggctcctcatcgccctccctgctaccttcgtcaacagtgccatccgttacctggagggccaactggccctgtcgttccgcagccgtctggtggcccacgcctaccgcctctacttctcccagcagacctactaccgggtcagcaacatggacgggcggcttcgcaaccctgaccagtctctgacggaggacgtggtggcctttgcggcctctgtggcccacctctactccaacctgaccaagccactcctggacgtggctgtgacttcctacaccctgcttcgggcggcccgctcccgtggagccggcacagcctggccctcggccatcgccggcctcgtggtgttcctcacggccaacgtgctgcgggccttctcgcccaagttcggggagctggtggcagaggaggcgcggcggaagggggagctgcgctacatgcactcgcgtgtggtggccaactcggaggagatcgccttctatgggggccatgaggtggagctggccctgctacagcgctcctaccaggacctggcctcgcagatcaacctcatccttctggaacgcctgtggtatgttatgctggagcagttcctcatgaagtatgtgtggagcgcctcgggcctgctcatggtggctgtccccatcatcactgccactggctactcagagtcagatgcagaggccgtgaagaaggcagccttggaaaagaaggaggaggagctggtgagcgagcgcacagaagccttcactattgcccgcaacctcctgacagcggctgcagatgccattgagcggatcatgtcgtcgtacaaggaggtgacggagctggctggctacacagcccgggtgcacgagatgttccaggtatttgaagatgttcagcgctgtcacttcaagaggcccagggagctagaggacgctcaggcggggtctgggaccataggccggtctggtgtccgtgtggagggccccctgaagatccgaggccaggtggtggacgtggaacaggggatcatctgcgagaacatccccatcgtcacgccctcaggagaggtggtggtggccagcctcaacatcagggtggaggaaggcatgcatctgctcatcacaggccccaatggctgcggcaagagctccctgttccggatcctgggtgggctctggcccacgtacggtggtgtgctctacaagcccccaccccagcgcatgttctacatcccgcagaggccctacatgtctgtgggctccctgcgtgaccaggtgatctacccggactcagtggaggacatgcaaaggaagggctactcggagcaggacctggaagccatcctggacgtcgtgcacctgcaccacatcctgcagcgggagggaggttgggaggctatgtgtgactggaaggacgtcctgtcgggtggcgagaagcagagaatcggcatggcccgcatgttctaccacaggcccaagtacgccctcctggatgaatgcaccagcgccgttagcatcgacgtggaaggcaagatcttccaggcggccaaggacgcgggcattgccctgctctccatcacccaccggccctccctgtggaaataccacacacacttgctacagttcgatggggagggcggctggaagttcgagaagctggactcagctgcccgcctgagcctgacggaggagaagcagcggctggagcagcagctggcgggcattcccaagatgcagcggcgcctccaggagctctgccagatcctgggcgaggccgtggccccagcgcatgtgccggcacctagcccgcaaggccctggtggcctccagggtgcctccacctgacacaaccgtccccggcccctgccccgcccccaagctcggatcacatgaattctgcagatatccagcacagtggcggccgctcgagctagcggccgctctagaaagagatccagacatgataagatacattgatgagtttggacaaaccacaactagaatgcagtgaaaaaaatgctttatttgtgaaatttgtgatgctattgctttatttgtaaccattataagctgcaataaacaagttaacaacaacaattgcattcattttatgtttcaggttcagggggaggtgtgggaggttttttagtcgactagagctcgctgatcagcctcgactgtgccttctagttgccagccatctgttgtttgcccctcccccgtgccttccttgaccctggaaggtgccactcccactgtcctttcctaataaaatgaggaaattgcatcgcattgtctgagtaggtgtcattctattctggggggtggggtggggcaggacagcaagggggaggattgggaagacaatagcaggcatgctggggagagatcgtgcggaccgagcggccgcaggaacccctagtgatggagttggccactccctctctgcgcgctcgctcgctcactgaggccgggcgaccaaaggtcgcccgacgcccgggctttgcccgggcggcctcagtgagcgagcgagcgcgcagctgcctgcaggggcgcctgatgcggtattttctccttacgcatctgtgcggtatttcacaccgcatacgtcaaagcaaccatagtacgcgccctgtagcggcgcattaagcgcggcgggtgtggtggttacgcgcagcgtgaccgctacacttgccagcgccttagcgcccgctcctttcgctttcttcccttcctttctcgccacgttcgccggctttccccgtcaagctctaaatcgggggctccctttagggttccgatttagtgctttacggcacctcgaccccaaaaaacttgatttgggtgatggttcacgtagtgggccatcgccctgatagacggtttttcgccctttgacgttggagtccacgttctttaatagtggactcttgttccaaactggaacaacactcaactctatctcgggctattcttttgatttataagggattttgccgatttcggtctattggttaaaaaatgagctgatttaacaaaaatttaacgcgaattttaacaaaatattaacgtttacaattttatggtgcactctcagtacaatctgctctgatgccgcatagttaagccagccccgacacccgccaacacccgctgacgcgccctgacgggcttgtctgctcccggcatccgcttacagacaagctgtgaccgtctccgggagctgcatgtgtcagaggttttcaccgtcatcaccgaaacgcgcgagacgaaagggcctcgtgatacgcctatttttataggttaatgtcatgacgcggaacccctatttgtttatttttctaaatacattcaaatatgtatccgctcatgagacaataaccctgataaatgcttcaataatattgaaaaaggaagagtatgagccatattcaacgggaaacgtcttgctctaggccgcgattaaattccaacatggatgctgatttatatgggtataaatgggctcgcgataatgtcgggcaatcaggtgcgacaatctatcgattgtatgggaagcccgatgcgccagagttgtttctgaaacatggcaaaggtagcgttgccaatgatgttacagatgagatggtcagactaaactggctgacggaatttatgcctcttccgaccatcaagcattttatccgtactcctgatgatgcatggttactcaccactgcgatccctgggaaaacagcattccaggtattagaagaatatcctgattcaggtgaaaatattgttgatgcgctggcagtgttcctgcgccggttgcattcgattcctgtttgtaattgtccttttaacagcgatcgcgtatttcgtctcgctcaggcgcaatcacgaatgaataacggtttggttgatgcgagtgattttgatgacgagcgtaatggctggcctgttgaacaagtctggaaagaaatgcataaacttttgccattctcaccggattcagtcgtcactcatggtgatttctcacttgataaccttatttttgacgaggggaaattaataggttgtattgatgttggacgagtcggaatcgcagaccgataccaggatcttgccatcctatggaactgcctcggtgagttttctccttcattacagaaacggctttttcaaaaatatggtattgataatcctgatatgaataaattgcagtttcatttgatgctcgatgagtttttctaatcatgaccaaaatcccttaacgtgagttttcgttccactgagcgtcagaccccgtagaaaagatcaaaggatcttcttgagatcctttttttctgcgcgtaatctgctgcttgcaaacaaaaaaaccaccgctaccagcggtggtttgtttgccggatcaagagctaccaactctttttccgaaggtaactggcttcagcagagcgcagataccaaatactgttcttctagtgtagccgtagttaggccaccacttcaagaactctgtagcaccgcctacatacctcgctctgctaatcctgttaccagtggctgctgccagtggcgataagtcgtgtcttaccgggttggactcaagacgatagttaccggataaggcgcagcggtcgggctgaacggggggttcgtgcacacagcccagcttggagcgaacgacctacaccgaactgagatacctacagcgtgagctatgagaaagcgccacgcttcccgaagggagaaaggcggacaggtatccggtaagcggcagggtcggaacaggagagcgcacgagggagcttccagggggaaacgcctggtatctttatagtcctgtcgggtttcgccacctctgacttgagcgtcgatttttgtgatgctcgtcaggggggcggagcctatggaaaaacgccagcaacgcggcctttttacggttcctggccttttgctggccttttgctcacatgtcctgcaggcag

SEQ ID NO: 11701 - DNA, 130 bp, synthetic construct; identical to SEQ ID NO: 10501
  misc_feature 1..130: note = pOB1017, 5'ITR
  source 1..130: mol_type = other DNA

SEQ ID NO: 11702-11704 - skipped (3 entries)

SEQ ID NO: 11705 - DNA, 366 bp, synthetic construct; identical to SEQ ID NO: 9905
  misc_feature 1..366: note = pOB1017, CMV Enhancer
  source 1..366: mol_type = other DNA

SEQ ID NO: 11706 - skipped

SEQ ID NO: 11707 - DNA, 278 bp, synthetic construct; identical to SEQ ID NO: 10
  misc_feature 1..278: note = pOB1017, CBA Promoter
  source 1..278: mol_type = other DNA

SEQ ID NO: 11708 - DNA, 93 bp, synthetic construct; identical to SEQ ID NO: 11
  misc_feature 1..93: note = pOB1017, beta-actin Exon
  source 1..93: mol_type = other DNA

SEQ ID NO: 11709 - DNA, 155 bp, synthetic construct; identical to SEQ ID NO: 9909
  misc_feature 1..155: note = pOB1017, Chimeric Intron
  source 1..155: mol_type = other DNA

SEQ ID NO: 11710 - DNA, 117 bp, synthetic construct; identical to SEQ ID NO: 9910
  misc_feature 1..117: note = pOB1017, hABCD1 5' UTR
  source 1..117: mol_type = other DNA

SEQ ID NO: 11711 - skipped

SEQ ID NO: 11712 - DNA, 2238 bp, synthetic construct; identical to SEQ ID NO: 11512
  misc_feature 1..2238: note = pOB1017, hABCD1/3nt
  source 1..2238: mol_type = other DNA

SEQ ID NO: 11713 - DNA, 49 bp, synthetic construct; identical to SEQ ID NO: 9913
  misc_feature 1..49: note = pOB1017, hABCD1 3' UTR
  source 1..49: mol_type = other DNA

SEQ ID NO: 11714 - DNA, 197 bp, synthetic construct; identical to SEQ ID NO: 9914
  misc_feature 1..197: note = pOB1017, SV40 pA
  source 1..197: mol_type = other DNA

SEQ ID NO: 11715 - skipped

SEQ ID NO: 11716 - DNA, 208 bp, synthetic construct; identical to SEQ ID NO: 9916
  misc_feature 1..208: note = pOB1017, bGH pA
  source 1..208: mol_type = other DNA

SEQ ID NO: 11717 - skipped

SEQ ID NO: 11718 - DNA, 130 bp, synthetic construct; identical to SEQ ID NO: 10518
  misc_feature 1..130: note = pOB1017, 3'ITR
  source 1..130: mol_type = other DNA

SEQ ID NO: 11719-11734 - skipped (16 entries)

SEQ ID NO: 11735 - DNA, 434 bp, synthetic construct; identical to SEQ ID NO: 206
  misc_feature 1..434: note = pOB1017, Total polyA
  source 1..434: mol_type = other DNA

SEQ ID NO: 11736-11749 - skipped (14 entries)

SEQ ID NO: 11750 - DNA, 4165 bp, synthetic construct
  misc_feature 1..4165: note = pOB1017, ITR-ITR
  source 1..4165: mol_type = other DNA
ctgcgcgctcgctcgctcactgaggccgcccgggcaaagcccgggcgtcgggcgacctttggtcgcccggcctcagtgagcgagcgagcgcgcagagagggagtggccaactccatcactaggggttcctgcggccgcaaccgtctagttattaatagtaatcaattacggggtcattagttcatagcccatatatggagttccgcgttacataacttacggtaaatggcccgcctggctgaccgcccaacgacccccgcccattgacgtcaataatgacgtatgttcccatagtaacgccaatagggactttccattgacgtcaatgggtggagtatttacggtaaactgcccacttggcagtacatcaagtgtatcatatgccaagtacgccccctattgacgtcaatgacggtaaatggcccgcctggcattatgcccagtacatgaccttatgggactttcctacttggcagtacatctacgtattagtcatcgctattaccatggtcgaggtgagccccacgttctgcttcactctccccatctcccccccctccccacccccaattttgtatttatttattttttaattattttgtgcagcgatgggggcggggggggggggggggcgcgcgccaggcggggcggggcggggcgaggggcggggcggggcgaggcggagaggtgcggcggcagccaatcagagcggcgcgctccgaaagtttccttttatggcgaggcggcggcggcggcggccctataaaaagcgaagcgcgcggcgggcgggagtcgctgcgcgctgccttcgccccgtgccccgctccgccgccgcctcgcgccgcccgccccggctctgactgaccgcgttactcccacaggtgagcgggcgggacggcccttctcctccgggctgtaattagcgcttggtttaatgacggcttgtttcttttctgtggctgcgtgaaagccttgaggggctccgggagctagagcctctgctaaccatgttcatgccttcttctttttcctacagctcctgggcaacgtgctggttattgtgctgtctcatcattttggcaaagaattcctcgaagatccgaaggggttcaagctttccagttgcctagacaacaggcccagggtcagagcaacaatccttccagccacctgcctcaactgctgccccaggcaccagccccagtccctacgcggcagccagcccaggtgacatgccggtgctctccaggccccggccctggcgggggaacacgctgaagcgcacggccgtgctcctggccctcgcggcctatggagcccacaaagtctaccccttggtgcgccagtgcctggccccggccaggggtcttcaggcgcccgccggggagcccacgcaggaggcctccggggtcgcggcggccaaagctggcatgaaccgggtattcctgcagcggctcctgtggctcctgcggctgctgttcccccgggtcctgtgccgggagacggggctgctggccctgcactcggccgccttggtgagccgcaccttcctgtcggtgtacgtggcccgcctggacggaaggctggcccgctgcatcgtccgcaaggacccgcgggcttttggctggcagctgctgcagtggctcctcatcgccctccctgctaccttcgtcaacagtgccatccgttacctggagggccaactggccctgtcgttccgcagccgtctggtggcccacgcctaccgcctctacttctcccagcagacctactaccgggtcagcaacatggacgggcggcttcgcaaccctgaccagtctctgacggaggacgtggtggcctttgcggcctctgtggcccacctctactccaacctgaccaagccactcctggacgtggctgtgacttcctacaccctgcttcgggcggcccgctcccgtggagccggcacagcctggccctcggccatcgccggcctcgtggtgttcctcacggccaacgtgctgcgggccttctcgcccaagttcggggagctggtggcagaggaggcgcggcggaagggggagctgcgctacatgcactcgcgtgtggtggccaactcggaggagatcgccttctatgggggccatgaggtggagctggccctgctacagcgctcctaccaggacctggcctcgcagatcaacctcatccttctggaacgcctgtggtatgttatgctggagcagttcctcatgaagtatgtgtggagcgcctcgggcctgctcatggtggctgtccccatcatcactgccactggctactcagagtcagatgcagaggccgtgaagaaggcagccttggaaaagaaggaggaggagctggtgagcgagcgcacagaagccttcactattgcccgcaacctcctgacagcggctgcagatgccattgagcggatcatgtcgtcgtacaaggaggtgacggagctggctggctacacagcccgggtgcacgagatgttccaggtatttgaagatgttcagcgctgtcacttcaagaggcccagggagctagaggacgctcaggcggggtctgggaccataggccggtctggtgtccgtgtggagggccccctgaagatccgaggccaggtggtggacgtggaacaggggatcatctgcgagaacatccccatcgtcacgccctcaggagaggtggtggtggccagcctcaacatcagggtggaggaaggcatgcatctgctcatcacaggccccaatggctgcggcaagagctccctgttccggatcctgggtgggctctggcccacgtacggtggtgtgctctacaagcccccaccccagcgcatgttctacatcccgcagaggccctacatgtctgtgggctccctgcgtgaccaggtgatctacccggactcagtggaggacatgcaaaggaagggctactcggagcaggacctggaagccatcctggacgtcgtgcacctgcaccacatcctgcagcgggagggaggttgggaggctatgtgtgactggaaggacgtcctgtcgggtggcgagaagcagagaatcggcatggcccgcatgttctaccacaggcccaagtacgccctcctggatgaatgcaccagcgccgttagcatcgacgtggaaggcaagatcttccaggcggccaaggacgcgggcattgccctgctctccatcacccaccggccctccctgtggaaataccacacacacttgctacagttcgatggggagggcggctggaagttcgagaagctggactcagctgcccgcctgagcctgacggaggagaagcagcggctggagcagcagctggcgggcattcccaagatgcagcggcgcctccaggagctctgccagatcctgggcgaggccgtggccccagcgcatgtgccggcacctagcccgcaaggccctggtggcctccagggtgcctccacctgacacaaccgtccccggcccctgccccgcccccaagctcggatcacatgaattctgcagatatccagcacagtggcggccgctcgagctagcggccgctctagaaagagatccagacatgataagatacattgatgagtttggacaaaccacaactagaatgcagtgaaaaaaatgctttatttgtgaaatttgtgatgctattgctttatttgtaaccattataagctgcaataaacaagttaacaacaacaattgcattcattttatgtttcaggttcagggggaggtgtgggaggttttttagtcgactagagctcgctgatcagcctcgactgtgccttctagttgccagccatctgttgtttgcccctcccccgtgccttccttgaccctggaaggtgccactcccactgtcctttcctaataaaatgaggaaattgcatcgcattgtctgagtaggtgtcattctattctggggggtggggtggggcaggacagcaagggggaggattgggaagacaatagcaggcatgctggggagagatcgtgcggaccgagcggccgcaggaacccctagtgatggagttggccactccctctctgcgcgctcgctcgctcactgaggccgggcgaccaaaggtcgcccgacgcccgggctttgcccgggcggcctcagtgagcgagcgagcgcgcag

SEQ ID NO: 11751-11759 - skipped (9 entries)

SEQ ID NO: 11760 - DNA, 4193 bp, synthetic construct
  misc_feature 1..4193: note = pOB1017, rAAV vector genome
  source 1..4193: mol_type = other DNA
tggccactccctctctgcgcgctcgctcgctcactgaggccgcccgggcaaagcccgggcgtcgggcgacctttggtcgcccggcctcagtgagcgagcgagcgcgcagagagggagtggccaactccatcactaggggttcctgcggccgcaaccgtctagttattaatagtaatcaattacggggtcattagttcatagcccatatatggagttccgcgttacataacttacggtaaatggcccgcctggctgaccgcccaacgacccccgcccattgacgtcaataatgacgtatgttcccatagtaacgccaatagggactttccattgacgtcaatgggtggagtatttacggtaaactgcccacttggcagtacatcaagtgtatcatatgccaagtacgccccctattgacgtcaatgacggtaaatggcccgcctggcattatgcccagtacatgaccttatgggactttcctacttggcagtacatctacgtattagtcatcgctattaccatggtcgaggtgagccccacgttctgcttcactctccccatctcccccccctccccacccccaattttgtatttatttattttttaattattttgtgcagcgatgggggcggggggggggggggggcgcgcgccaggcggggcggggcggggcgaggggcggggcggggcgaggcggagaggtgcggcggcagccaatcagagcggcgcgctccgaaagtttccttttatggcgaggcggcggcggcggcggccctataaaaagcgaagcgcgcggcgggcgggagtcgctgcgcgctgccttcgccccgtgccccgctccgccgccgcctcgcgccgcccgccccggctctgactgaccgcgttactcccacaggtgagcgggcgggacggcccttctcctccgggctgtaattagcgcttggtttaatgacggcttgtttcttttctgtggctgcgtgaaagccttgaggggctccgggagctagagcctctgctaaccatgttcatgccttcttctttttcctacagctcctgggcaacgtgctggttattgtgctgtctcatcattttggcaaagaattcctcgaagatccgaaggggttcaagctttccagttgcctagacaacaggcccagggtcagagcaacaatccttccagccacctgcctcaactgctgccccaggcaccagccccagtccctacgcggcagccagcccaggtgacatgccggtgctctccaggccccggccctggcgggggaacacgctgaagcgcacggccgtgctcctggccctcgcggcctatggagcccacaaagtctaccccttggtgcgccagtgcctggccccggccaggggtcttcaggcgcccgccggggagcccacgcaggaggcctccggggtcgcggcggccaaagctggcatgaaccgggtattcctgcagcggctcctgtggctcctgcggctgctgttcccccgggtcctgtgccgggagacggggctgctggccctgcactcggccgccttggtgagccgcaccttcctgtcggtgtacgtggcccgcctggacggaaggctggcccgctgcatcgtccgcaaggacccgcgggcttttggctggcagctgctgcagtggctcctcatcgccctccctgctaccttcgtcaacagtgccatccgttacctggagggccaactggccctgtcgttccgcagccgtctggtggcccacgcctaccgcctctacttctcccagcagacctactaccgggtcagcaacatggacgggcggcttcgcaaccctgaccagtctctgacggaggacgtggtggcctttgcggcctctgtggcccacctctactccaacctgaccaagccactcctggacgtggctgtgacttcctacaccctgcttcgggcggcccgctcccgtggagccggcacagcctggccctcggccatcgccggcctcgtggtgttcctcacggccaacgtgctgcgggccttctcgcccaagttcggggagctggtggcagaggaggcgcggcggaagggggagctgcgctacatgcactcgcgtgtggtggccaactcggaggagatcgccttctatgggggccatgaggtggagctggccctgctacagcgctcctaccaggacctggcctcgcagatcaacctcatccttctggaacgcctgtggtatgttatgctggagcagttcctcatgaagtatgtgtggagcgcctcgggcctgctcatggtggctgtccccatcatcactgccactggctactcagagtcagatgcagaggccgtgaagaaggcagccttggaaaagaaggaggaggagctggtgagcgagcgcacagaagccttcactattgcccgcaacctcctgacagcggctgcagatgccattgagcggatcatgtcgtcgtacaaggaggtgacggagctggctggctacacagcccgggtgcacgagatgttccaggtatttgaagatgttcagcgctgtcacttcaagaggcccagggagctagaggacgctcaggcggggtctgggaccataggccggtctggtgtccgtgtggagggccccctgaagatccgaggccaggtggtggacgtggaacaggggatcatctgcgagaacatccccatcgtcacgccctcaggagaggtggtggtggccagcctcaacatcagggtggaggaaggcatgcatctgctcatcacaggccccaatggctgcggcaagagctccctgttccggatcctgggtgggctctggcccacgtacggtggtgtgctctacaagcccccaccccagcgcatgttctacatcccgcagaggccctacatgtctgtgggctccctgcgtgaccaggtgatctacccggactcagtggaggacatgcaaaggaagggctactcggagcaggacctggaagccatcctggacgtcgtgcacctgcaccacatcctgcagcgggagggaggttgggaggctatgtgtgactggaaggacgtcctgtcgggtggcgagaagcagagaatcggcatggcccgcatgttctaccacaggcccaagtacgccctcctggatgaatgcaccagcgccgttagcatcgacgtggaaggcaagatcttccaggcggccaaggacgcgggcattgccctgctctccatcacccaccggccctccctgtggaaataccacacacacttgctacagttcgatggggagggcggctggaagttcgagaagctggactcagctgcccgcctgagcctgacggaggagaagcagcggctggagcagcagctggcgggcattcccaagatgcagcggcgcctccaggagctctgccagatcctgggcgaggccgtggccccagcgcatgtgccggcacctagcccgcaaggccctggtggcctccagggtgcctccacctgacacaaccgtccccggcccctgccccgcccccaagctcggatcacatgaattctgcagatatccagcacagtggcggccgctcgagctagcggccgctctagaaagagatccagacatgataagatacattgatgagtttggacaaaccacaactagaatgcagtgaaaaaaatgctttatttgtgaaatttgtgatgctattgctttatttgtaaccattataagctgcaataaacaagttaacaacaacaattgcattcattttatgtttcaggttcagggggaggtgtgggaggttttttagtcgactagagctcgctgatcagcctcgactgtgccttctagttgccagccatctgttgtttgcccctcccccgtgccttccttgaccctggaaggtgccactcccactgtcctttcctaataaaatgaggaaattgcatcgcattgtctgagtaggtgtcattctattctggggggtggggtggggcaggacagcaagggggaggattgggaagacaatagcaggcatgctggggagagatcgtgcggaccgagcggccgcaggaacccctagtgatggagttggccactccctctctgcgcgctcgctcgctcactgaggccgggcgaccaaaggtcgcccgacgcccgggctttgcccgggcggcctcagtgagcgagcgagcgcgcagagagggagtggcca

SEQ ID NO: 11761-11784 - skipped (24 entries)

SEQ ID NO: 11785 - DNA, 54 bp, synthetic construct; identical to SEQ ID NO: 9985
  misc_feature 1..54: note = pOB1017, Rabbit beta-globin exon
  source 1..54: mol_type = other DNA
